(19) United States
(12) Patent Application Publication
(10) Pub. No.: US 2016/0165861 A1
(43) Pub. Date: Jun. 16, 2016

(54) GENETICALLY MODIFIED CELLS, TISSUES, AND ORGANS FOR TREATING DISEASE

(71) Applicant: Regents of the University of Minnesota, Minneapolis, MN (US)

(72) Inventors: Bernhard J. HERING, Minnetonka, MN (US); Christopher BURLAK, Minnetonka, MN (US)

(21) Appl. No.: 14/965,451

(22) Filed: Dec. 10, 2015

Related U.S. Application Data
(60) Provisional application No. 62/090,037, filed on Dec. 10, 2014.
(60) Provisional application No. 62/253,493, filed on Nov. 10, 2015.

(51) Int. Cl. A01K 67/027; C07K 16/28; C12N 5/071

(52) U.S. Cl. CPC A01K 67/0275; C12N 5/0677; C12N 5/0676; C07K 16/2878; A01K 2217/054; A01K 2227/10

(57) ABSTRACT

Genetically modified cells, tissues, and organs for treating or preventing diseases are disclosed. Also disclosed are methods of making the genetically modified cells and non-human animals.

### CROSS-REFERENCE

[0001] This application claims the benefit of U.S. Provisional Patent Application No. 62/090,037, filed on Dec. 10, 2014, and U.S. Provisional Patent Application No. 62/253,493, filed on Nov. 10, 2015, which are both herein incorporated by reference in their entirety.

### SEQUENCE LISTING

[0002] The instant application contains a Sequence Listing which has been submitted electronically in ASCII format and is hereby incorporated by reference in its entirety. Said ASCII copy, created on Dec. 10, 2015, is named 47190-701.201_SL.txt and is 681,444 bytes in size.

### BACKGROUND OF THE DISCLOSURE

[0003] There is a shortage of organs, tissues or cells available for transplantation in recipients such as humans. Xenotransplantation or allotransplantation of organs, tissues, or cells into humans has the potential to fulfill this need and help hundreds of thousands of people every year. Non-human animals can be chosen as organ donors based on their anatomical and physiological similarities to humans. Additionally, xenotransplantation has implications not only in humans, but also in veterinary applications.

[0004] However, unmodified wild-type non-human animal tissues can be rejected by recipients, such as humans, by the immune system. Rejection is believed to be caused at least in part by antibodies binding to the tissues and cell-mediated immunity leading to graft loss. For example, pig grafts can be rejected by cellular mechanisms mediated by adaptive immune cells.

### INCORPORATION BY REFERENCE

[0005] All publications, patents, and patent applications herein are incorporated by reference to the same extent as if each individual publication, patent, or patent application was specifically and individually indicated to be incorporated by reference. In the event of a conflict between a term herein and a term in an incorporated reference, the term herein controls.

### SUMMARY

[0006] Disclosed herein are compositions and methods for treating or preventing diseases. Also disclosed are genetically modified cells and methods of making the genetically modified cells for treating or preventing disease. Further disclosed are genetically modified non-human animals and methods of making genetically modified non-human animals that can be used in treating or preventing disease, e.g., by later extracting cells, tissues, or organs from these genetically modified non-human animals and transplanting them into a subject. Also disclosed herein are methods for treating or preventing diseases using the genetically modified cells, tissues, and organs. Additionally disclosed are methods for treating or preventing diseases using cells, tissues, and/or organs from genetically modified non-human animals.

[0007] In one aspect, disclosed herein is a genetically modified animal with reduced protein expression of one or more first genes, where the genetically modified animal is a member of the Laurasiatheria superorder or is a non-human primate, where the one or more first genes comprise a) a component of a major histocompatibility complex (MHC) I-specific enhanceosome, b) a transporter of an MHC I-binding peptide, and/or c) complement component 3 (C3), where the reduced protein expression is in comparison to a non-genetically modified counterpart animal. In some cases, the member of the Laurasiatheria super order is an ungulate. In some cases, the ungulate is a pig. In some cases, the protein expression of the one or more first genes is absent in the genetically modified animal. In some cases, the reduction of protein expression inactivates a function of the one or more first genes. In some cases, the genetically modified animal has reduced protein expression of two or more the first genes. In some cases, the genetically modified animal comprises reduced expression of a component of a MHC I-specific enhanceosome, where the component of a MHC I-specific enhanceosome is NOD-like receptor family CARD domain containing 5 (NLRC5). In some cases, the genetically modified animal comprises reduced expression of a transporter of a MHC I-binding peptide, where the transporter is transporter associated with antigen processing 1 (TAP1). In some cases, the genetically modified animal comprises reduced expression of comprising C3. In some cases, the genetically modified animal has reduced protein expression of three or more the first genes.

[0008] In some cases, the genetically modified animal further comprises reduced protein expression of one or more second genes, where the one or more second genes comprise: a) a natural killer (NK) group 2D ligand, b) an endogenous gene not expressed in a human, c) a CXC chemokine receptor (CXCR) 3 ligand, and/or d) MHC II transactivator (CIITA), where the reduced protein expression is in comparison to a non-genetically modified counterpart animal. In some cases, the protein expression of the one or more second genes is absent in the genetically modified animal. In some cases, the reduction of protein expression inactivates a function of the one or more second genes. In some cases, the genetically modified animal comprises reduced protein expression of a NK group 2D ligand, where the NK group 2D ligand is MHC class I polypeptide-related sequence A (MICA) or MHC class I polypeptide-related sequence B (MICB). In some cases, the genetically modified animal comprises reduced protein expression of an endogenous gene not expressed in a human, where the endogenous gene not expressed in a human is glycoprotein galactosyltransferase alpha 1,3 (GGTA1), putative cytidine monophosphate-N-acetylneuraminic acid hydroxylase-like protein (CMAH), or β1,4 N-acetylgalactosaminyltransferase (B4GALNT2). In some cases, the genetically modified animal comprises reduced protein expression of a CXCR3 ligand, where the CXCR3 ligand is C-X-C motif chemokine 10 (CXCL10).

[0009] In some cases, the genetically modified animal further comprises one or more exogenous polynucleotides encoding one or more proteins or functional fragments thereof, where the one or more proteins comprise: a) an MHC I formation suppressor, b) a regulator of complement activation, c) an inhibitory ligand for NK cells, d) a B7 family member, e) CD47, f) a serine protease inhibitor, and/or g) galectin. In some cases, the one or more proteins are human proteins. In some cases, the genetically modified animal comprises one or more exogenous polynucleotides encoding an MHC I formation suppressor, where the MHC I formation suppressor is infected cell protein 47 (ICP47). In some cases, the genetically modified animal comprises one or more exogenous polynucleotides encoding a regulator of complement activation, where the regulator of complement activation is cluster of differentiation 46 (CD46), cluster of differentiation 55 (CD55), or cluster of differentiation 59 (CD59). In some cases, the genetically modified animal comprises one or more exogenous polynucleotides encoding an inhibitory ligand for NK cells, where the inhibitory ligands for NK cells is leukocyte antigen E (HLA-E), human leukocyte antigen G (HLA-G), or β-2-microglobulin (B2M). In some cases, the genetically modified animal comprises one or more exogenous polynucleotides encoding HLA-G, where the HLA-G is HLA-G1, HLA-G2, HLA-G3, HLA-G4, HLA-G5, HLA-G6, or HLA-G7. In some cases, the HLA-G is HLA-G1. In some cases, the genetically modified animal comprises one or more exogenous polynucleotides encoding a B7 family member, where the B7 family member is a programmed death-ligand. In some cases, the programmed death-ligand is programmed death-ligand 1 (PD-L1) or programmed death-ligand 2 (PD-L2). In some cases, the one or more exogenous polynucleotides encode both PD-L1 and PD-L2. In some cases, the genetically modified animal comprises one or more exogenous polynucleotides encoding a serine protease inhibitor, where the serine protease inhibitor is serine protease inhibitor 9 (Spi9). In some cases, the genetically modified animal comprises one or more exogenous polynucleotides encoding a galectin, where the galectin is galectin-9.

[0010] In some cases, the genetically modified animal comprises reduced protein expression of NLRC5 or TAP1, C3, reduced protein expression of CXCL10, GGTA1, CMAH, and/or B4GALNT2; and/or one or more exogenous polynucleotides encoding HLA-G1, HLA-E, or a functional fragment thereof, PD-L1 or a functional fragment thereof, PD-L2 or a functional fragment thereof, and/or CD47 or a functional fragment thereof. In some cases, the one or more exogenous polynucleotides are inserted adjacent to a ubiquitous promoter. In some cases, the ubiquitous promoter is a Rosa26 promoter. In some cases, the one or more exogenous polynucleotides are inserted adjacent to a promoter of a targeted gene or within the targeted gene. In some cases, the targeted gene is one of the first genes or one of the second genes. In some cases, the protein expression of the one or more first genes is reduced using a CRISPR/cas system. In some cases, the protein expression of the one or more second genes is reduced using a CRISPR/cas system.

[0011] In another aspect, disclosed herein is a genetically modified animal that is a member of the Laurasiatheria superorder or is a non-human primate comprising: an exogenous polynucleotide encoding an inhibitory ligand for an NK cell or a functional fragment thereof, and reduced protein expression of an endogenous gene, where the reduced protein expression is in comparison to a non-genetically modified counterpart animal. In some cases, the inhibitory ligand for an NK cell is HLA-E or HLA-G. In some cases, the inhibitory ligand for an NK cell is HLA-G, where the HLA-G is HLA-G1, HLA-G2, HLA-G3, HLA-G4, HLA-G5, HLA-G6, or HLA-G7. In some cases, the HLA-G is HLA-G. In some cases, the endogenous gene is a gene not expressed in a human. In some cases, the endogenous gene is GGTA1, CMAH, and/or B4GALNT2.

[0012] In some cases, the genetically modified animal further comprises exogenous polynucleotides encoding: a) PD-L1 or a functional fragment thereof, b) PD-L2 or a functional fragment thereof, and/or c) CD47 or a functional fragment thereof. In some cases, the exogenous polynucleotides are inserted adjacent to a ubiquitous promoter. In some cases, the ubiquitous promoter is a Rosa26 promoter. In some cases, the exogenous polynucleotides are inserted adjacent to a promoter of the endogenous gene, or within the endogenous gene. In some cases, the protein expression of the endogenous genes is reduced using a CRISPR/cas system.

[0013] Further disclosed herein is a population of genetically modified animals comprising two or more animals disclosed in the application. In some cases, at least two or more animals have identical phenotypes. In some cases, at least two or more animals have identical genotypes.

[0014] In another aspect, disclosed herein is a genetically modified cell from a member of the Laurasiatheria superorder or a non-human primate, comprising reduced protein expression of one or more first genes, where the one or more first genes comprise: a) a component of a MHC I-specific enhanceosome, b) a transporter of a MHC I-binding peptide, and/or c) C3, where the reduced protein expression is in comparison to a non-genetically modified counterpart cell. In some cases, the genetically modified cell comprises reduced protein expression of a component of a MHC I-specific enhanceosome, where the component of MHC I-specific enhanceosome is NLRC5. In some cases, the genetically modified cell comprises reduced protein expression of a transporter of a MHC I-binding peptide, where the transporter of a MHC I-binding peptide is TAP1. In some cases, the genetically modified cell comprises reduced protein expression of C3.

[0015] In some cases, the genetically modified cell further comprises reduced protein expression of one or more second genes, where the one or more second genes comprise: a) an NK group 2D ligands, b) an endogenous gene not expressed in a human, c) a CXCR3 ligand, and/or d) CIITA, where the reduced protein expression is in comparison to a non-genetically modified counterpart cell. In some cases, the genetically modified cell comprises reduced protein expression of an NK group 2D ligand, where the NK group 2D ligand is MICA and/or MICB. In some cases, the genetically modified cell comprises reduced protein expression of an endogenous gene not expressed in a human, where the endogenous gene not expressed in a human is GGTA1, CMAH, and/or B4GALNT2. In some cases, the genetically modified cell comprises reduced protein expression of a CXCR3 ligand, where the CXCR3 ligand is CXCL10.

[0016] In some cases, the genetically modified cell further comprises one or more exogenous polynucleotides encoding one or more proteins or functional fragments thereof, where the one or more proteins or functional fragments thereof comprise: an MHC I formation suppressor, a regulator of complement activation, an inhibitory ligand for NK cells, a B7 family member, CD47, a serine protease inhibitor, and/or galectin. In some cases, the one or more proteins or functional fragments thereof are human proteins. In some cases, the genetically modified cell comprises one or more exogenous polynucleotides encoding an MHC I formation suppressor, where the MHC I formation suppressor is ICP47. In some cases, the genetically modified cell comprises comprising one or more exogenous polynucleotides encoding a regulator of complement activation, where the regulator of complement activation is CD46, CD55, and/or CD59. In some cases, the genetically modified cell comprises one or more exogenous polynucleotides encoding an inhibitory ligand for NK cells, where the inhibitory ligands for NK cells is HLA-E, HLA-G, and/or B2M. In some cases, the genetically modified cell comprises the inhibitory ligands for NK cells is HLA-G, and the HLA-G is HLA-G1, HLA-G2, HLA-G3, HLA-G4, HLA-G5, HLA-G6, and/or HLA-G7. In some cases, the genetically modified cell comprises one or more exogenous polynucleotides encoding a B7 family member, where the B7 family member is a programmed death-ligand. In some cases, the HLA-G is HLA-G1. In some cases, the programmed death-ligand is programmed death-ligand 1 (PD-L1) and/or programmed death-ligand 2 (PD-L2). In some cases, the programmed death-ligand is both PD-L1 and PD-L2. In some cases, the genetically modified cell comprises one or more exogenous polynucleotides encoding a serine protease inhibitor, where the serine protease inhibitor is serine protease inhibitor 9 (Spi9). In some cases, the genetically modified cell comprises one or more exogenous polynucleotides encoding galectin, where the galectin is galectin-9.

[0017] In some cases, the genetically modified cell comprises reduced protein expression of NLRC5 or TAP1, C3, CXCL10, GGTA1, CMAH, and/or B4GALNT2; and/or exogenous polynucleotides encoding i) HLA-G1, HLA-E, or a functional fragment thereof, ii) PD-L1 or a functional fragment thereof, iii) PD-L2 or a functional fragment thereof, and/or iv) CD47 or a functional fragment thereof. In some cases, the one or more exogenous polynucleotides are inserted adjacent to a ubiquitous promoter. In some cases, the ubiquitous promoter is a Rosa26 promoter. In some cases, the one or more exogenous polynucleotides are inserted adjacent to a promoter of a targeted gene or within the targeted gene. In some cases, the targeted gene is one of the first genes or one of the second genes. In some cases, the protein expression of the one or more first genes is reduced using a CRISPR/cas system. In some cases, the protein expression of the one or more second genes is reduced using a CRISPR/cas system.

[0018] In another aspect, disclosed herein is a genetically modified cell from a member of the Laurasiatheria superorder or a non-human primate, comprising: a) an exogenous polynucleotide encoding an inhibitory ligand for an NK cell or a functional fragment thereof, and b) reduced protein expression of an endogenous gene, where the reduced protein expression is in comparison to a non-genetically modified counterpart cell.

[0019] In some cases, the inhibitory ligand for an NK cell is HLA-E or HLA-G. In some cases, the inhibitory ligand for an NK cell is HLA-G, and the HLA-G is HLA-G1, HLA-G2, HLA-G3, HLA-G4, HLA-G5, HLA-G6, or HLA-G7. In some cases, the HLA-G is HLA-G1. In some cases, the endogenous gene is not expressed in a human. In some cases, the endogenous gene is GGTA1, CMAH, and/or B4GALNT2. In some cases, the genetically modified cell further comprises exogenous polynucleotides encoding: a) PD-L1 or a functional fragment thereof, b) PD-L2 or a functional fragment thereof, and/or c) CD47 or a functional fragment thereof. In some cases, the exogenous polynucleotides are inserted adjacent to a ubiquitous promoter. In some cases, the ubiquitous promoter is a Rosa26 promoter. In some cases, the exogenous polynucleotides are inserted adjacent to a promoter of the endogenous gene, or within the endogenous gene. In some cases, the protein expression of the endogenous genes is reduced using a CRISPR/cas system. In some cases, the genetically modified cell is a pancreatic, kidney, eye, liver, small bowel, lung, or heart cell. In some cases, the genetically modified cell is a pancreatic islet cell. In some cases, the pancreatic islet cell is a pancreatic β cell. In some cases, the genetically modified cell is a spleen, liver, peripheral blood, lymph nodes, thymus, or bone marrow cell. In some cases, the genetically modified cell is a porcine cell. In some cases, the genetically modified cell is from an embryotic tissue, a non-human fetal animal, perinatal non-human animal, neonatal non-human animal, preweaning non-human animal, young adult non-human animal, or adult non-human animal.

[0020] In another aspect, also disclosed herein is vaccine suitable for use in generating tolerance in a subject to transplanting a cell, tissue or organ which comprises an injectable composition comprising cells as defined in the application. Disclosed herein also includes a tolerizing vaccine comprising the genetically modified cell described in the application. In some cases, the genetically modified cell is an apoptotic cell. In some cases, the genetically modified cell is a fixed cell. In some cases, the vaccine further comprises a non-fixed cell. In some cases, the fixed cell and the non-fixed cell are genetically identical. In some cases, the fixed cell is fixed by a chemical and/or the fixed cell induces anergy of immune cells in the subject. In some cases, the genetically modified cell is an 1-Ethyl-3-(3-imethylaminopropyl)carbodiimide (ECDI)-fixed cell.

[0021] In another aspect, disclosed herein is a tissue or organ comprising the genetically modified cell described in the application.

[0022] In another aspect, disclosed herein is a pancreas or pancreatic islet comprising the genetically modified cell described herein.

[0023] In another aspect, disclosed herein is a pharmaceutical composition comprising the genetically modified cell described herein and a pharmaceutically acceptable excipient.

[0024] In another aspect, disclosed herein is a genetically modified cell, tissue, or organ comprising a genetically modified cell for use in transplanting to a subject in need thereof to treat a condition in the subject, where the subject is tolerized to the genetically modified cell, tissue, or organ by use of a vaccine. In some cases, the subject is administered one or more pharmaceutical agents that inhibit T cell activation, B cell activation, and/or dendritic cell activation.

[0025] In another aspect, disclosed herein is a method for treating a condition in a subject in need thereof comprising a) transplanting the genetically modified cell, tissue or organ described in the application; b) administering a vaccine described in the application to the subject; and/or c) administering one or more pharmaceutical agents that inhibit T cell activation, B cell activation, and/or dendritic cell activation to the subject.

[0026] In another aspect, disclosed herein is a method for treating a condition in a subject in need thereof comprising: a) administering a vaccine to the subject; and b) transplanting a genetically modified cell, tissue, or organ comprising a genetically modified cell to the subject. In some cases, administering to the subject one or more pharmaceutical agents that inhibits T cell activation, B cell activation, and/or dendritic cell activation. In some cases, the transplanted genetically modified cell is the genetically modified cell described in the application. In some cases, the vaccine is the vaccine described in the application. In some cases, the vaccine comprises from or from about 0.001 to 1.0 endotoxin unit per kg bodyweight of the subject. In some cases, the vaccine comprises from or from about 1 to 10 aggregates per μl. In some cases, the vaccine is administered 7 days before the transplantation and 1 day after the transplantation. In some cases, the vaccine comprises at least from or from about 1×10⁸ to 4×10⁸ splenocytes or splenic B cells per kg bodyweight of the subject. In some cases, the splenocytes or splenic B cells comprise from or from about 80% to 100% CD21 positive SLA Class II positive B cells. In some cases, the vaccine is provided intravenously. In some cases, the transplanted cell, tissue, or organ is functional for at least 7 days after transplanted to the subject. In some cases, the transplanting is xenotransplanting. In some cases, the pharmaceutical agent comprises a first dose of an anti-CD40 antibody. In some cases, the first dose is given to the subject about 8 days before the transplantation. In some cases, the first dose comprises from or from about 30 mg to 70 mg of anti-CD40 antibody per kg body weight of the subject. In some cases, the method further comprises administering one or more additional immunosuppression agents to the subject. In some cases, the one or more additional immunosuppression agents comprise a B-cell depleting antibody, an mTOR inhibitor, a TNF-alpha inhibitor, an IL-6 inhibitor, a complement C3 or C5 inhibitor, and/or a nitrogen mustard alkylating agent. In some cases, one of the additional immunosuppression agents is a nitrogen mustard alkylating agent. In some cases, one of the nitrogen mustard alkylating agent is cyclophosphamide. In some cases, the cyclophosphamide is administered 2 or 3 days after the administration of the vaccine.

[0027] In some cases, where the cyclophosphamide is administered at a dose of from or from about 50 mg/kg/day and 60 mg/kg/day. In some cases, the subject is a human subject. In some cases, the subject is a non-human animal. In some cases, the non-human animal is a cat or a dog. In some cases, the condition is a disease. In some cases, the disease is diabetes. In some cases, the diabetes is type 1 diabetes, type 2 diabetes, surgical diabetes, cystic fibrosis-related diabetes, and/or mitochondrial diabetes.

[0028] In another aspect, disclosed herein is a method for immunotolerizing a recipient to a graft comprising providing to the recipient the vaccine described in the application.

[0029] In another aspect, disclosed herein is method for treating a condition in a subject in need thereof comprising transplanting the genetically modified cell described in the application.

[0030] In another aspect, disclosed herein is a genetically modified cell described in the application, or a tissue or organ comprising the genetically modified cell, for use in transplanting to a subject in need thereof to treat a condition in the subject, where the subject is tolerized to the genetically modified cell, tissue, or organ by the vaccine described in the application, and where one or more pharmaceutical agents that inhibit T cell activation, B cell activation, and/or dendritic cell activation, is administered to the subject. In some cases the transplanting is xenotransplanting.

[0031] In another aspect, disclosed herein is a genetically modified cell described in the application, or a tissue or organ comprising the genetically modified cell, for use in administering to a subject in need thereof to treat a condition in the subject.

[0032] In another aspect, disclosed herein is a vaccine described in the application for use in immunotolerizing a recipient to a graft.

[0033] In another aspect, disclosed herein is a method for making a genetically modified animal described in the application, comprising: a) obtaining a cell with reduced expression of one or more of a component of a MHC I-specific enhanceosome, a transporter of a MHC I-binding peptide, and/or C3; b) generating an embryo from the cell; and c) growing the embryo into the genetically modified animal. In some cases, the cell is a zygote.

[0034] In another aspect, disclosed herein is a method for making a genetically modified animal described in the application, comprising: a) obtaining a first cell with reduced expression of one or more of a component of a MHC I-specific enhanceosome, a transporter of a MHC I-binding peptide, and/or C3; b) transferring a nucleus of the first cell to a second cell to generate an embryo; and c) growing the embryo to the genetically modified animal. In some cases, the reducing is performed by gene editing. In some cases, the gene editing is performed using a CRISPR/cas system.

### BRIEF DESCRIPTION OF THE DRAWINGS

[0035] The novel features of the invention are set forth with particularity in the appended claims. A better understanding of the features and advantages of the present invention will be obtained by reference to the following detailed description that sets forth illustrative embodiments, in which the principles of the invention are utilized, and the accompanying drawings of which:

[0036] FIG. 1 demonstrates an immunotherapeutic strategy centered around the use of genetically modified cell and organ grafts lacking functional expression of MHC class I. The need for maintenance immunosuppression required for the prevention of graft rejection is progressively reduced (or the applicability of transplantation of cell and organ xenografts and the transplantation of stem cell-derived cellular allografts and xenografts is progressively increased) when the transplantation of genetically modified cells and organs is combined with transient use of antagonistic anti-CD40 antibodies and even more when combined with the administration of tolerizing vaccines comprising apoptotic donor cells under the cover of anti-CD40 antibodies.

[0037] FIG. 2 demonstrates one strategy of making genetically modified pig islet cells and tolerizing vaccines. Two clonal populations of pigs are created. One population having at least GGTA1 knocked out can be used to create a tolerizing vaccine. The other clonal population of pigs that have at least GGTA1 and MHC I genes (e.g., NRLC5) knocked out, can be used for cell, tissues, and/or organ donors.

[0038] FIG. 3 demonstrates use of positive and tolerizing vaccines (also referred to as a negative vaccine).

[0039] FIG. 4 demonstrates an exemplary approach to extending the survival of xenografts in a subject with infusion of apoptotic donor splenocytes for tolerizing vaccination under the cover of transient immunosuppression.

[0040] FIG. 5 shows an exemplary approach to preventing rejection or extending survival of xenografts in a recipient in the absence of chronic and generalized immunosuppression of the xenograft recipient. This exemplary approach includes and integrates three components: i) genetically engineered islets with deficient and/or reduced expression of αGal, MHC class I, complement C3, and CXCL10 and transgenic expression the HLA-G; ii) genetically engineered donor apoptotic and non-apoptotic mononuclear cells (e.g., splenocytes) with deficient and/or reduced expression of αGal, Neu5Gc, and Sda/CAD as well as transgenic expression of HLA-G with or without human CD47, human PD-L1, human PD-L2 (e.g., the genetically engineered vaccine); and iii) the administration of transient immunosuppression including antagonistic anti-CD40 mAb, anti-CD20 mAb, rapamycin, and transient anti-inflammatory therapy including compstatin (e.g., the compstatin derivative APL-2), anti-IL-6 receptor mAb, and soluble TNF receptor.

[0041] FIG. 6 demonstrates an exemplary protocol for transplant rejection prophylaxis in a pig-to-cynomolgus monkey islet xenotransplantation. IE: islet equivalent; sTNFR: soluble TNF receptor (e.g., etanercept); α-IL-6R: anti-interleukin 6 receptor; Tx'd: transplanted.

[0042] FIGS. 7A-7E demonstrate a strategy for cloning a px330-Gal2-1 plasmid targeting GGTA1. FIG. 7A shows a cloning strategy and oligonucleotides for making a guide RNA targeting GGTA1. FIG. 7B shows an insertion site on the px330 plasmid. FIG. 7C shows a flow chart demonstrating the cloning and verification strategy. FIG. 7D shows a cloning site and sequencing primers. FIG. 7E shows sequencing results.

[0043] FIGS. 8A-8E demonstrate a strategy for cloning a px330-CM1F plasmid targeting CMAH. FIG. 8A shows a cloning strategy and oligonucleotides for making a guide RNA targeting CMAH1. FIG. 8B shows an insertion site on the px330 plasmid. FIG. 8C shows a flow chart demonstrating the cloning and verification strategy. FIG. 8D shows a cloning site and sequencing primers. FIG. 8E shows sequencing results.

[0044] FIGS. 9A-9E demonstrate a strategy for cloning a px330-NL1 FIRST plasmid targeting NLRC5. FIG. 9A shows a cloning strategy and oligonucleotides for making a guide RNA targeting NLRC5. FIG. 9B shows an insertion site on the px330 plasmid. FIG. 9C shows a flow chart demonstrating the cloning and verification strategy. FIG. 9D shows a cloning site and sequencing primers. FIG. 9E shows sequencing results.

[0045] FIGS. 10A-10E demonstrate a strategy for cloning a px330/C3-5 plasmid targeting C3. FIG. 10A shows a cloning strategy and oligonucleotides for making a guide RNA targeting C3. FIG. 10B shows an insertion site on the px330 plasmid. FIG. 10C shows a flow chart demonstrating the cloning and verification strategy. FIG. 10D shows a cloning site and sequencing primers. FIG. 10E shows sequencing results.

[0046] FIGS. 11A-11E demonstrate a strategy for cloning a px330/B41 second plasmid targeting B4GALNT2. FIG. 11A shows a cloning strategy and oligonucleotides for making a guide RNA targeting B4GALNT2. FIG. 11B shows an insertion site on the px330 plasmid. FIG. 11C shows a flow chart demonstrating the cloning and verification strategy. FIG. 11D shows a cloning site and sequencing primers. FIG. 11E shows sequencing results.

[0047] FIG. 12 demonstrates a map of Rosa26 locus sequenced in Example 2.

[0048] FIGS. 13A-13E demonstrate a strategy for cloning a px330/Rosa exon 1 plasmid targeting Rosa26. FIG. 13A shows a cloning strategy and oligonucleotides for making a guide RNA targeting Rosa26. FIG. 13B shows an insertion site on the px330 plasmid. FIG. 13C shows a flow chart demonstrating the cloning and verification strategy. FIG. 13D shows a cloning site and sequencing primers. FIG. 13E shows sequencing results.

[0049] FIG. 14A shows a map of the genomic sequence of GGTA1. FIG. 14B shows a map of the cDNA sequence of GGTA1.

[0050] FIG. 15 shows an exemplary microscopic view of porcine fetal fibroblasts transfected with pSpCas9(BB)-2A-GFP.

[0051] FIG. 16 shows a fluorescence in situ hybridization (FISH) to the GGTA1 gene by specific probes revealing the location on chromosome 1.

[0052] FIGS. 17A-17B demonstrate an example of phenotypic selection of cells with cas9/sgRNA-mediated GGTA1/NLCR5 disruption. FIG. 17A shows genetically modified cells, which do not express alpha-galactosidase. FIG. 17B shows non-genetically modified cells, which express alpha-galactosidase and were labeled with isolectin B4 (IB)-linked ferrous beads.

[0053] FIGS. 18A-18C demonstrates validation of GGTA1, CMAH, and NLRC5 disruption in pig cells. FIG. 18A demonstrates validation of GGTA1 disruption in pig cells. FIG. 18B demonstrates validation of CMAH disruption in pig cells. FIG. 18C demonstrates validation of NLRC5 disruption in pig cells.

[0054] FIGS. 19A-19B demonstrate the inhibitory effects of an anti-SLA antibody on the pig islet-induced human CD8+ T cell activation. FIG. 19A shows the proliferation of CD8+ T cells, CD4 T cells and natural killer (NK) cells in a mixed culture with adult pig islets for 7 days in the presence (black bars) or absence (white bars) of the anti-SLA antibody. FIG. 19B shows the viability (assessed by AO/PI staining) of adult pig islets cultured with or without highly purified lymphocytes for 7 days in the presence (black bars) or absence (white bars) of the anti-SLA class I antibody.

[0055] FIGS. 20A-20B demonstrate T cell activation induced by porcine islets. FIG. 20A demonstrates the result of ELISPOT assays. The results show the suppression of a posttransplant increase of anti-donor T cells with direct and indirect specificity secreting IFN-γ in a cynomolgus monkey. The monkey was treated with peritransplant infusion of apoptotic donor splenocytes from a GT-KO donor pig, and islets from the same donor pig on day 0 under the cover of transient immunosuppression with anti-CD40 monoclonal antibody, rapamycin, sTNFR, and anti-IL-6R monoclonal antibody. FIG. 20B demonstrates CD8 staining of an intraportally transplanted adult porcine islet undergoing rejection at 141 days after transplantation.

[0056] FIGS. 21A-21D demonstrate porcine islet graft survival in a monkey in the absence of maintenance immunosuppression. FIG. 21A demonstrates blood glucose levels and exogenous insulin needed to maintain normal blood glucose level before and after transplantation. FIG. 21B demonstrates serum porcine C-peptide level in a monkey. FIG. 21C demonstrates blood glucose levels in response to glucose challenges. FIG. 21D demonstrates serum porcine C-peptide levels in response to glucose challenges.

[0057] FIG. 22A demonstrates rejection of non-genetically modified porcine islets by a monkey transplanted with islets and receiving anti-CD40 antibody four times through day 14 after transplantation and maintenance immunosuppression with CTLA4-Ig and rapamycin. FIG. 22B demonstrates amelioration of diabetes by transplanted porcine islets in monkeys receiving anti-CD40 antibody four times through day 14 after transplantation and maintenance immunosuppression with CTLA4-Ig and rapamycin.

[0058] FIG. 23A demonstrates amelioration of diabetes (restoration of sustained normoglycemia and insulin independence) by transplanted porcine islets in a monkey (ID #13CP7) receiving maintenance immunosuppression with rapamycin and anti-CD40 antibody weekly after transplantation. The monkey was given an anti-CD40 antibody and rapamycin for 21 days starting from the day of transplantation. FIG. 23B demonstrates serum porcine C-peptide levels (fasted, random, and stimulated) in the same recipient (ID #13CP7).

[0059] FIG. 24 shows the increase of circulating CD8+ CD2hi CD28− effector memory T cells in two cynomolgus monkeys at the time of sacrifice (after presumed rejection) compared with baseline and the high prevalence of CD8+ CD2hi CD28− effector memory T cells within the CD8+ T cell compartment in liver mononuclear cells at the time of sacrifice. Both monkeys received intraportal xenotransplants of adult porcine islets. Pre Tx: pretransplant; PBL: peripheral blood leukocyte; Sac: sacrifice; Lym: lymphocyte; LMNC: liver mononuclear cell.

[0060] FIG. 25 shows suppression of circulating CD8+ CD2hi CD28− effector memory T cells by peritransplant infusion of apoptotic donor splenocytes (MX-ECDI-vaccine) compared with controls that received the same transient immunosuppression but no apoptotic donor splenocytes (MX-ECDI-controls). Pre Tx: pretransplant; Sac: sacrifice; Lym: lymphocyte; LMNC: liver mononuclear cell.

[0061] FIG. 26 shows suppression of circulating CD8+ CD2hi CD28− effector memory T cells by apoptotic donor splenocytes and α-CD40 antibodies. CM: cynomolgus monkey; Pre Tx: pretransplant; D: day.

[0062] FIG. 27 shows suppression of circulating CD4+CD25hi FoxP3+ CD127low regulatory T cells by apoptotic donor splenocytes and α-CD40 antibodies. CM: cynomolgus monkey; Pre Tx: pretransplant; D: day.

[0063] FIG. 28 shows suppression of circulating CD8+CD122+ natural suppressor cells by apoptotic donor splenocytes and α-CD40 antibodies. CM: cynomolgus monkey; Pre Tx: pretransplant; D: day.

[0064] FIGS. 29A-29B show sequencing of DNA isolated from fetal cells of two separate litters (Pregnancy 1: FIG. 29A or Pregnancy 2: FIG. 29B) subjected to PCR amplification of the GGTA1 (compared to Sus scrofa breed mixed chromosome 1, Sscrofa10.2 NCBI Reference Sequence: NC_010443.4) target regions and the resulting amplicons were separated on 1% agarose gels. Amplicons were also analyzed by sanger sequencing using the forward primer alone from each reaction. In FIG. 29 A, the results are shown from Pregnancy 1's fetuses 1, 2, 4, 5, 6, and 7, truncated 6 nucleotides after the target site for GGTA1. Fetus 3 was truncated 17 nucleotides after the cut site followed by a 2,511 (668-3179) nucleotide deletion followed by a single base substitution. Truncation, deletion and substitution from a single sequencing experiment containing the alleles from both copies of the target gene can only suggest a gene modification has occurred but not reveal the exact sequence for each allele. From this analysis it appears that all 7 fetuses have a single allele modification for GGTA1. FIG. 29B shows pregnancy 2 fetal DNA samples 1, 3, 4, and 5 were truncated 3 nucleotides from the GGTA1 gene target site. Fetus 2 had variability in sanger sequencing that suggests a complex variability in DNA mutations or poor sample quality. However, fetal DNA template quality was sufficient for the generation of the GGTA1 gene screening experiment described above.

[0065] FIGS. 30A-30B show sequencing of DNA isolated from fetal cells of two separate litters (Pregnancy 1: FIG. 30A or Pregnancy 2: FIG. 30B) subjected to PCR amplification of the NLRC5 (consensus sequence) target regions and the resulting amplicons were separated on 1% agarose gels. Amplicons were also analyzed by sanger sequencing using the forward primer alone from each reaction. Sequence analysis of the NLRC5 target site for fetuses from Pregnancy 1 (FIG. 30A) was unable to show consistent alignment suggesting an unknown complication in the sequencing reaction or varying DNA modifications between NLRC5 alleles that complicate the sanger sequencing reaction and analysis. NLRC5 gene amplicons from Pregnancy 2 (FIG. 30B) were all truncated 120 nucleotides downstream of the NLRC5 gene cut site.

[0066] FIGS. 31A-31B show data from fetal DNA (wt and 1-7 (FIG. 31A: Pregnancy 1) or 1-5 (FIG. 31B: Pregnancy 2) isolated from hind limb biopsies. Target genes were amplified by PCR and PCR products were separated on 1% agarose gels and visualized by fluorescent DNA stain. The amplicon band present in the wt lanes represent the unmodified DNA sequence. An increase or decrease in size of the amplicon suggests an insertion or deletion within the amplicon, respectively. Variation in the DNA modification between alleles in one sample may make the band appear more diffuse. Pregnancy 1 (FIG. 31A) resulted in 7 fetuses while pregnancy 2 (FIG. 31B) resulted in 5 fetuses harvested at 45 and 43 days, respectively. A lack of band as in the NLRC5 gel in fetuses 1, 3, and 4 of FIG. 31A (bottom gel), suggests that the modification to the target region have disrupted the binding of DNA amplification primers. The presence of all bands in GGTA 1 in FIG. 31A (top gel) suggests that DNA quality was sufficient to generate DNA amplicons in the NLRC5 targeting PCR reactions. Fetuses 1, 2, 4, and 5 of Pregnancy 1 (FIG. 31A) have larger GGTA 1 amplicons than the WT suggesting an insertion within the target area. In fetus 3 of Pregnancy 1 (FIG. 31A), the GGTA 1 amplicon migrated faster than the WT control suggesting a deletion within the target area. Fetuses 6 and 7 of Pregnancy 1 (FIG. 31A) NLRC5 amplicons migrated faster than the WT suggesting a deletion within the target area. Fetuses 1-5 (FIG. 31B) GGTA1 amplicons were difficult to interpret by size and were diffuse as compared to the WT control. Fetuses 1-5 (FIG. 31B) NLRC5 amplicons were uniform in size and density as compared to the wild type control.

[0067] FIGS. 32A-32E shows phenotypic analysis of fetuses from two separate litters of pigs (FIGS. 32A-32C: Pregnancy 1 or FIGS. 32D-32E: Pregnancy 2). Fetuses were harvested at day 45 (Pregnancy 1) or 43 days (Pregnancy 2) and processed for DNA and culture cell isolation. Tissue fragments and cells were plated in culture media for 2 days to allow fetal cells to adhere and grow. Wild type cells (fetal cells not genetically modified) and fetal cells from pregnancy 1 and 2 were removed from culture plates and labeled with IB4 lectin conjugated to alexa fluor 488 or anti-porcine MHC class I antibody conjugated to FITC. Flow cytometric analysis is shown as histograms depicting the labeling intensity of the cells tested. The histogram for the WT cells are included in each panel to highlight the decrease in overall intensity of each group of fetal cells. There is a decrease in alpha Gal and MHC class I labeling in pregnancy 1 (FIGS. 32A-32C) indicated as a decrease in peak intensity. In pregnancy 2 (FIGS. 32D-32E) fetuses 1 and 3 have a large decrease in alpha gal labeling and significant reduction in MHC class 1 labeling as compared to WT fetal cells.

[0068] FIGS. 33A-33C shows the impact of decreased MHC class I expression in cells from Fetus 3 (Pregnancy 1) as compared to wild type fetal cells from a genetic clone. The proliferative response of human CD8+ cells and CD4 T cells to porcine control fibroblast and NLRC5 knockout fetal cells were measured. FIG. 33A. Cells were gated as CD4 or CD8 before assessment of proliferation. FIG. 33B. CD8 T cell proliferation was reduced following treatments stimulation by porcine fetal GGTA1/NLRC5 knockout cells compared to control unmodified porcine fibroblast. Almost a 55% reduction in CD8 T cells proliferation was observed when human responders were treated with porcine fetal GGTA1/NLRC5 knockout cells at 1:1 ratio. Wild type fetal cells elicited a 17.2% proliferation in human CD8 T cells whereas the MHC class I deficient cells from fetus 3 (Pregnancy 1) induced only a 7.6% proliferation. No differences were seen in CD8 T cells proliferative response at 1:5 and 1:10 ratio compared to unmodified fetal cells. FIG. 33C. No changes were observed in CD4 T cell proliferation in response to NLRC5 knockout and control unmodified porcine fetal cells at all ratios studied.

### DETAILED DESCRIPTION OF THE DISCLOSURE

[0069] The following description and examples illustrate embodiments of the invention in detail. It is to be understood that this invention is not limited to the particular embodiments described herein and as such can vary. Those of skill in the art will recognize that there are numerous variations and modifications of this invention, which are encompassed within its scope.

[0070] Failure of organ and tissue function can result in premature death of individuals. Transplantation can potentially solve this problem, which can prolong the lives of many individuals. However, there is a shortage of cells, organs, and/or tissues that can be used for transplantation.

[0071] Xenografts or allografts (e.g., embryonic or induced pluripotent stem cells) can be used to create an unlimited supply of cells, organs, and/or tissues used for transplantation. In general, some transplantation can lead to increased immune response which can ultimately lead to transplantation rejection. Isografts or autografts typically do not result in rejection. However, allografts and xenografts can result in immune reaction and can ultimately lead to the destruction of the graft. The risk of rejection in some cases can be mitigated by suppressing the immune response.

[0072] Traditionally, immunosuppressive drugs were used after transplantation. However, there are many detrimental effects associated with long-term treatment with immunosuppressive drugs, including but not limited to increased risk of cancer and infection. Alternative methods to prevent graft rejection and suppress the immune system were sought. The immune response can be tempered by use of various techniques, including those described herein. For example, one method described herein to prevent transplantation rejection or prolong the time to transplantation rejection without or with minimal immunosuppressive drug use, an animal, e.g., a donor non-human animal, could be altered, e.g., genetically. Subsequently, the cells, organs, and/or tissues of the altered animal, e.g., a donor non-human animal, can be harvested and used in allografts or xenografts. Alternatively, cells can be extracted from an animal, e.g., a human or non-human animal (including but not limited to primary cells) or cells can be previously extracted animal cells, e.g., cell lines. These cells can be used to create a genetically altered cell.

[0073] Transplant rejection (e.g., T cells-mediated transplant rejection) can be prevented by chronic immunosuppression. However, immunosuppression is costly and associated with the risk of serious side effects. To circumvent the need for chronic immunosuppression, a multifaceted, T cell-targeted rejection prophylaxis was developed (FIG. 1) that
[0074] i) utilizes genetically modified grafts lacking functional expression of MHC class I, thereby interfering with activation of CD8⁺ T cells with direct specificity and precluding cytolytic effector functions of these CD8⁺ T cells,
[0075] ii) interferes with B cell (and other APC)-mediated priming and memory generation of anti-donor T cells using induction immunotherapy comprising antagonistic anti-CD40 mAbs (and depleting anti-CD20 mAbs and a mTOR inhibitor), and/or
[0076] iii) deletes anti-donor T cells with indirect specificity via peritransplant infusions of apoptotic donor cell vaccines.

[0077] Described herein are genetically modified non-human animals (such as non-human primates or a genetically modified animal that is member of the Laurasiatheria superorder, e.g., ungulates) and organs, tissues, or cells isolated therefrom, tolerizing vaccines, and methods for treating or preventing a disease in a recipient in need thereof by transplantation of an organ, tissue, or cell isolated from a non-human animal. An organ, tissue, or cell isolated from a non-human animal (such as non-human primates or a genetically modified animal that is member of the Laurasiatheria superorder, e.g., ungulates) can be transplanted into a recipient in need thereof from the same species (an allotransplant) or a different species (a xenotransplant). A recipient can be tolerized with a tolerizing vaccine and/or one or more immunomodulatory agents (e.g., an antibody). In embodiments involving xenotransplantation the recipient can be a human. Suitable diseases that can be treated are any in which an organ, tissue, or cell of a recipient is defective or injured, (e.g., a heart, lung, liver, vein, skin, or pancreatic islet cell) and a recipient can be treated by transplantation of an organ, tissue, or cell isolated from a non-human animal.

### DEFINITIONS

[0078] The term “about” in relation to a reference numerical value and its grammatical equivalents as used herein can include the numerical value itself and a range of values plus or minus 10% from that numerical value. For example, the amount “about 10” includes 10 and any amounts from 9 to 11. For example, the term “about” in relation to a reference numerical value can also include a range of values plus or minus 10%, 9%, 8%, 7%, 6%, 5%, 4%, 3%, 2%, or 1% from that value.

[0079] The term “non-human animal” and its grammatical equivalents as used herein includes all animal species other than humans, including non-human mammals, which can be a native animal or a genetically modified non-human animal. A non-human mammal includes, an ungulate, such as an even-toed ungulate (e.g., pigs, peccaries, hippopotamuses, camels, llamas, chevrotains (mouse deer), deer, giraffes, pronghorn, antelopes, goat-antelopes (which include sheep, goats and others), or cattle) or an odd-toed ungulate (e.g., horse, tapirs, and rhinoceroses), a non-human primate (e.g., a monkey, or a chimpanzee), a Canidae (e.g., a dog) or a cat. A non-human animal can be a member of the Laurasiatheria superorder. The Laurasiatheria superorder can include a group of mammals as described in Waddell et al., Towards Resolving the Interordinal Relationships of Placental Mammals. Systematic Biology 48 (1): 1-5 (1999). Members of the Laurasiatheria superorder can include Eulipotyphla (hedgehogs, shrews, and moles), Perissodactyla (rhinoceroses, horses, and tapirs), Carnivora (carnivores), Cetartiodactyla (artiodactyls and cetaceans), Chiroptera (bats), and Pholidota (pangolins). A member of Laurasiatheria superorder can be an ungulate described herein, e.g., an odd-toed ungulate or even-toed ungulate. An ungulate can be a pig. A member can be a member of Carnivora, such as a cat, or a dog. In some cases, a member of the Laurasiatheria superorder can be a pig.

[0080] The term “pig” and its grammatical equivalents as used herein can refer to an animal in the genus Sus, within the Suidae family of even-toed ungulates. For example, a pig can be a wild pig, a domestic pig, mini pigs, a Sus scrofa pig, a Sus scrofa domesticus pig, or inbred pigs.

[0081] The term “transgene” and its grammatical equivalents as used herein can refer to a gene or genetic material that can be transferred into an organism. For example, a transgene can be a stretch or segment of DNA containing a gene that is introduced into an organism. When a transgene is transferred into an organism, the organism can then be referred to as a transgenic organism. A transgene can retain its ability to produce RNA or polypeptides (e.g., proteins) in a transgenic organism. A transgene can comprise a polynucleotide encoding a protein or a fragment (e.g., a functional fragment) thereof. The polynucleotide of a transgene can be an exogenous polynucleotide. A fragment (e.g., a functional fragment) of a protein can comprise at least or at least about 5%, 10%, 20%, 30%, 40%, 50%, 60%, 70%, 80%, 90%, 95%, or 99% of the amino acid sequence of the protein. A fragment of a protein can be a functional fragment of the protein. A functional fragment of a protein can retain part or all of the function of the protein.

[0082] The term “genetic modification” and its grammatical equivalents as used herein can refer to one or more alterations of a nucleic acid, e.g., the nucleic acid within an organism's genome. For example, genetic modification can refer to alterations, additions, and/or deletion of genes. A genetically modified cell can also refer to a cell with an added, deleted and/or altered gene. A genetically modified cell can be from a genetically modified non-human animal. A genetically modified cell from a genetically modified non-human animal can be a cell isolated from such genetically modified non-human animal. A genetically modified cell from a genetically modified non-human animal can be a cell originated from such genetically modified non-human animal. For example, a cell

[0083] The term “islet” or “islet cells” and their grammatical equivalents as used herein can refer to endocrine (e.g., hormone-producing) cells present in the pancreas of an organism. For example, islet cells can comprise different types of cells, including, but not limited to, pancreatic α cells, pancreatic β cells, pancreatic δ cells, pancreatic F cells, and/or pancreatic ε cells. Islet cells can also refer to a group of cells, cell clusters, or the like.

[0084] The term “condition” condition and its grammatical equivalents as used herein can refer to a disease, event, or change in health status.

[0085] The term “diabetes” and its grammatical equivalents as used herein can refer to is a disease characterized by high blood sugar levels over a prolonged period. For example, the term “diabetes” and its grammatical equivalents as used herein can refer to all or any type of diabetes, including, but not limited to, type 1, type 2, cystic fibrosis-related, surgical, gestational diabetes, and mitochondrial diabetes. In some cases, diabetes can be a form of hereditary diabetes.

[0086] The term “phenotype” and its grammatical equivalents as used herein can refer to a composite of an organism's observable characteristics or traits, such as its morphology, development, biochemical or physiological properties, phenology, behavior, and products of behavior. Depending on the context, the term “phenotype” can sometimes refer to a composite of a population's observable characteristics or traits.

[0087] The term “disrupting” and its grammatical equivalents as used herein can refer to a process of altering a gene, e.g., by deletion, insertion, mutation, rearrangement, or any combination thereof. For example, a gene can be disrupted by knockout. Disrupting a gene can be partially reducing or completely suppressing expression (e.g., mRNA and/or protein expression) of the gene. Disrupting can also include inhibitory technology, such as shRNA, siRNA, microRNA, dominant negative, or any other means to inhibit functionality or expression of a gene or protein.

[0088] The term “gene editing” and its grammatical equivalents as used herein can refer to genetic engineering in which one or more nucleotides are inserted, replaced, or removed from a genome. For example, gene editing can be performed using a nuclease (e.g., a natural-existing nuclease or an artificially engineered nuclease).

[0089] The term “transplant rejection” and its grammatical equivalents as used herein can refer to a process or processes by which an immune response of an organ transplant recipient mounts a reaction against the transplanted material (e.g., cells, tissues, and/or organs) sufficient to impair or destroy the function of the transplanted material.

[0090] The term “hyperacute rejection” and its grammatical equivalents as used herein can refer to rejection of a transplanted material or tissue occurring or beginning within the first 24 hours after transplantation. For example, hyperacute rejection can encompass but is not limited to “acute humoral rejection” and “antibody-mediated rejection”.

[0091] The term “negative vaccine”, “tolerizing vaccine” and their grammatical equivalents as used herein, can be used interchangeably. A tolerizing vaccine can tolerize a recipient to a graft or contribute to tolerization of the recipient to the graft if used under the cover of appropriate immunotherapy. This can help to prevent transplantation rejection.

[0092] The term “recipient”, “subject” and their grammatical equivalents as used herein, can be used interchangeably. A recipient or a subject can be a human or non-human animal. A recipient or a subject can be a human or non-human animal that will receive, is receiving, or has received a transplant graft, a tolerizing vaccine, and/or other composition disclosed in the application. A recipient or subject can also be in need of a transplant graft, a tolerizing vaccine and/or other composition disclosed in the application. In some cases, a recipient can be a human or non-human animal that will receive, is receiving, or has received a transplant graft.

[0093] Some numerical values disclosed throughout are referred to as, for example, “X is at least or at least about 100; or 200 [or any numerical number].” This numerical value includes the number itself and all of the following:
[0094] i) X is at least 100;
[0095] ii) X is at least 200;
[0096] iii) X is at least about 100; and
[0097] iv) X is at least about 200.
   All these different combinations are contemplated by the numerical values disclosed throughout. All disclosed numerical values should be interpreted in this manner, whether it refers to an administration of a therapeutic agent or referring to days, months, years, weight, dosage amounts, etc., unless otherwise specifically indicated to the contrary.

[0098] The ranges disclosed throughout are sometimes referred to as, for example, “X is administered on or on about day 1 to 2; or 2 to 3 [or any numerical range].” This range includes the numbers themselves (e.g., the endpoints of the range) and all of the following:
[0099] i) X being administered on between day 1 and day 2;
[0100] ii) X being administered on between day 2 and day 3;
[0101] iii) X being administered on between about day 1 and day 2;
[0102] iv) X being administered on between about day 2 and day 3;
[0103] v) X being administered on between day 1 and about day 2;
[0104] vi) X being administered on between day 2 and about day 3;
[0105] vii) X being administered on between about day 1 and about day 2; and
[0106] viii) X being administered on between about day 2 and about day 3.
   All these different combinations are contemplated by the ranges disclosed throughout. All disclosed ranges should be interpreted in this manner, whether it refers to an administration of a therapeutic agent or referring to days, months, years, weight, dosage amounts, etc., unless otherwise specifically indicated to the contrary.

[0107] The terms “and/or” and “any combination thereof” and their grammatical equivalents as used herein, can be used interchangeably. These terms can convey that any combination is specifically contemplated. Solely for illustrative purposes, the following phrases “A, B, and/or C” or “A, B, C, or any combination thereof” can mean “A individually; B individually; C individually; A and B; B and C; A and C; and A, B, and C.”

### I. Genetically Modified Non-Human Animals

[0108] Provided herein are genetically modified animals that can be donors of cells, tissues, and/or organs for transplantation. A genetically modified non-human animal can be any desired species. For example, a genetically modified non-human animal described herein can be a genetically modified non-human mammal. A genetically modified non-human mammal can be a genetically modified ungulate, including a genetically modified even-toed ungulate (e.g., pigs, peccaries, hippopotamuses, camels, llamas, chevrotains (mouse deer), deer, giraffes, pronghorn, antelopes, goat-antelopes (which include sheep, goats and others), or cattle) or a genetically modified odd-toed ungulate (e.g., horse, tapirs, and rhinoceroses), a genetically modified non-human primate (e.g., a monkey, or a chimpanzee) or a genetically modified Canidae (e.g., a dog). A genetically modified non-human animal can be a member of the Laurasiatheria superorder. A genetically modified non-human animal can be a non-human primate, e.g., a monkey, or a chimpanzee. If a non-human animal is a pig, the pig can be at least or at least about 5, 50, 100, or 300 pounds, e.g., the pig can be or be about between 5 pounds to 50 pounds; 25 pounds to 100 pounds; or 75 pounds to 300 pounds. In some cases, a non-human animal is a pig that has given birth at least one time.

[0109] A genetically modified non-human animal can be of any age. For example, the genetically modified non-human animal can be a fetus; from or from about 1 day to 1 month; from or from about 1 month to 3 months; from or from about 3 months to 6 months; from or from about 6 months to 9 months; from or from about 9 months to 1 year; from or from about 1 year to 2 years. A genetically modified non-human animal can be a non-human fetal animal, perinatal non-human animal, neonatal non-human animal, preweaning non-human animal, young adult non-human animal, or an adult non-human animal.

[0110] A genetically modified non-human animal can comprise reduced expression of one or more genes compared to a non-genetically modified counterpart animal. A non-genetically modified counterpart animal can be an animal substantially identical to the genetically modified animal but without genetic modification in the genome. For example, a non-genetically modified counterpart animal can be a wild-type animal of the same species as the genetically modified animal. The non-human animal can provide cells, tissues or organs for transplanting to a recipient or subject in need thereof. A recipient or subject in need thereof can be a recipient or subject known or suspected of having a condition. The condition can be treated, prevented, reduced, eliminated, or augmented by the methods and compositions disclosed herein. The recipient can exhibit low or no immuno-response to the transplanted cells, tissues or organs. The transplanted cells, tissues or organs can be non-recognizable by CD8+ T cells, NK cells, or CD4+ T cells of the recipient (e.g., a human or another animal). The genes whose expression is reduced can include MHC molecules, regulators of MHC molecule expression, and genes differentially expressed between the donor non-human animal and the recipient (e.g., a human or another animal). The reduced expression can be mRNA expression or protein expression of the one or more genes. For example, the reduced expression can be protein expression of the one or more genes. Reduced expression can also include no expression. For example an animal, cell, tissue or organ with reduced expression of a gene can have no expression (e.g., mRNA and/or protein expression) of the gene. Reduction of expression of a gene can inactivate the function of the gene. In some cases, when expression of a gene is reduced in a genetically modified animal, the expression of the gene is absent in the genetically modified animal.

[0111] The genetically modified non-human animal can comprise reduced expression of one or more MHC molecules compared to a non-genetically modified counterpart animal. For example, the non-human animal can be an ungulate, e.g., a pig, with reduced expression of one or more swine leukocyte antigen (SLA) class I and/or SLA class II molecules.

[0112] The genetically modified non-human animal can comprise reduced expression of any genes that regulate major histocompatibility complex (MHC) molecules (e.g., MHC I molecules and/or MHC II molecules) compared to a non-genetically modified counterpart animal. Reducing expression of such genes can result in reduced expression and/or function of MHC molecules (e.g., MHC I molecules and/or MHC II molecules). In some cases, the one or more genes whose expression is reduced in the non-human animal can comprise one or more of the following: components of an MHC I-specific enhanceosome, transporters of a MHC I-binding peptide, natural killer group 2D ligands, CXC chemical receptor (CXCR) 3 ligands, complement component 3 (C3), and major histocompatibility complex II transactivator (CIITA). In some cases, the component of a MHC I-specific enhanceosome can be NLRC5. In some cases, the component of a MHC I-specific enhanceosome can also comprise regulatory factor X (RFX) (e.g., RFX1), nuclear transcription factor Y (NFY), and cAMP response element-binding protein (CREB). In some instances, the transporter of a MHC I-binding peptide can be Transporter associated with antigen processing 1 (TAP1). In some cases, the natural killer (NK) group 2D ligands can comprise MICA and MICB. For example, the genetically modified non-human animal can comprise reduced expression of one or more of the following genes: NOD-like receptor family CARD domain containing 5 (NLRC5), Transporter associated with antigen processing 1 (TAP1), C-X-C motif chemokine 10 (CXCL10), MHC class I polypeptide-related sequence A (MICA), MHC class I polypeptide-related sequence B (MICB), complement component 3 (C3), and CIITA. A genetically modified animal can comprise reduced expression of one or more of the following genes: a component of an MHC I-specific enhanceosome (e.g., NLRC5), a transporter of an MHC I-binding peptide (TAP1), and C3.

[0113] The genetically modified non-human animal can comprise reduced expression compared to a non-genetically modified counterpart of one or more genes expressed at different levels between the non-human animal and a recipient receiving a cell, tissue, or organ from the non-human animal. For example, the one or more genes can be expressed at a lower level in a human than in the non-human animal. In some cases, the one or more genes can be endogenous genes of the non-human animal. The endogenous genes are in some cases genes not expressed in another species. For example, the endogenous genes of the non-human animal can be genes that are not expressed in a human. For example, in some cases, homologs (e.g., orthologs) of the one or more genes do not exist in a human. In another example, homologs (e.g., orthologs) of the one or more genes can exist in a human but are not expressed.

[0114] In some cases, the non-human animal can be a pig, and the recipient can be a human. In these cases, the one or more genes can be any genes expressed in a pig but not in a human. For example, the one or more genes can comprise glycoprotein galactosyltransferase alpha 1,3 (GGTA1), putative cytidine monophosphate-N-acetylneuraminic acid hydroxylase-like protein (CMAH), and β1,4 N-acetylgalactosaminyltransferase (B4GALNT2). A genetically modified non-human animal can comprise reduced expression of B4GALNT2, GGTA1, or CMAH, where the reduced expression is in comparison to a non-genetically modified counterpart animal. A genetically modified non-human animal can comprise reduced expression of B4GALNT2 and GGTA1, where the reduced expression is in comparison to a non-genetically modified counterpart animal. A genetically modified non-human animal can comprise reduced expression of B4GALNT2 and CMAH, where the reduced expression is in comparison to a non-genetically modified counterpart animal. A genetically modified non-human animal can comprise reduced expression of B4GALNT2, GGTA1, and CMAH, where the reduced expression is in comparison to a non-genetically modified counterpart animal.

[0115] The genetically modified non-human animal can comprise reduced expression compared to a non-genetically modified counterpart of one or more of any of the genes disclosed herein, including NLRC5, TAP1, CXCL10, MICA, MICB, C3, CIITA, GGTA1, CMAH, and B4GALNT2.

[0116] A genetically modified non-human animal can comprise one or more genes whose expression is reduced, e.g., where genetic expression is reduced. The one or more genes whose expression is reduced include but are not limited to NOD-like receptor family CARD domain containing 5 (NLRC5), Transporter associated with antigen processing 1 (TAP1), Glycoprotein galactosyltransferase alpha 1,3 (GGTA1), Putative cytidine monophosphate-N-acetylneuraminic acid hydroxylase-like protein (CMAH), C-X-C motif chemokine 10 (CXCL10), MHC class I polypeptide-related sequence A (MICA), MEW class I polypeptide-related sequence B (MICB), class II major histocompatibility complex transactivator (CIITA), Beta-1,4-N-Acetyl-Galactosaminyl Transferase 2 (B4GALNT2), complemental component 3 (C3), and/or any combination thereof.

[0117] A genetically modified non-human animal can comprise 1, 2, 3, 4, 5, 6, 7, 8, 9, 10, 11, 12, 13, 14, 15, 16, 17, 18, 19, 20 or more genes whose expression is disrupted. For illustrative purposes, and not to limit various combinations a person of skill in the art can envision, a genetically modified non-human animal can have NLRC5 and TAP1 individually disrupted. A genetically modified non-human animal can also have both NLRC5 and TAP1 disrupted. A genetically modified non-human animal can also have NLRC5 and TAP1, and in addition to one or more of the following GGTA1, CMAH, CXCL10, MICA, MICB, B4GALNT2, or CIITA genes disrupted; for example “NLRC5, TAP1, and GGTA1” or “NLRC5, TAP1, and CMAH” can be disrupted. A genetically modified non-human animal can also have NLRC5, TAP1, GGTA1, and CMAH disrupted. Alternatively, a genetically modified non-human animal can also have NLRC5, TAP1, GGTA1, B4GALNT2, and CMAH disrupted. In some cases, a genetically modified non-human animal can have C3 and GGTA1 disrupted. In some cases, a genetically modified non-human animal can have reduced expression of NLRC5, C3, GGTA1, B4GALNT2, CMAH, and CXCL10. In some cases, a genetically modified non-human animal can have reduced expression of TAP1, C3, GGTA1, B4GALNT2, CMAH, and CXCL10. In some cases, a genetically modified non-human animal can have reduced expression of NLRC5, TAP1, C3, GGTA1, B4GALNT2, CMAH, and CXCL10.

[0118] Lack of MHC class I expression on transplanted human cells can cause the passive activation of natural killer (NK) cells (Ohlen et al., 1989). Lack of MEW class I expression could be due to NLRC5, TAP1, or B2M gene deletion. NK cell cytotoxicity can be overcome by the expression of the human MEW class 1 gene, HLA-E, can stimulate the inhibitory receptor CD94/NKG2A on NK cells to prevent cell killing (Weiss et al., 2009; Lilienfeld et al., 2007; Sasaki et al., 1999). Successful expression of the HLA-E gene can be dependent on co-expression of the human B2M (beta 2 microglobulin) gene and a cognate peptide (Weiss et al., 2009; Lilienfeld et al., 2007; Sasaki et al., 1999; Pascasova et al., 1999). A nuclease mediated break in the stem cell DNA can allow for the insertion of one or multiple genes via homology directed repair. The HLA-E and hB2M genes in series can be integrated in the region of the nuclease mediated DNA break thus preventing expression of the target gene (for example, NLRC5) while inserting the transgenes.

[0119] Expression levels of genes can be reduced to various extents. For example, expression of one or more genes can be reduced by or by about 100%. In some cases, expression of one or more genes can be reduced by or by about 99%, 95%, 90%, 85%, 80%, 75%, 70%, 65%, 60%, 55%, or 50% of normal expression, e.g., compared to the expression of non-modified controls. In some cases, expression of one or more genes can be reduced by at least or to at least about 99% to 90%; 89% to 80%, 79% to 70%; 69% to 60%; 59% to 50% of normal expression, e.g., compared to the expression of non-modified controls. For example, expression of one or more genes can be reduced by at least or at least about 90% or by at least or at least about 90% to 99% of normal expression.

[0120] Expression can be measured by any known method, such as quantitative PCR (qPCR), including but not limited to PCR, real-time PCR (e.g., Sybr-green), and/or hot PCR. In some cases, expression of one or more genes can be measured by detecting the level of transcripts of the genes. For example, expression of one or more genes can be measured by Northern blotting, nuclease protection assays (e.g., RNase protection assays), reverse transcription PCR, quantitative PCR (e.g., real-time PCR such as real-time quantitative reverse transcription PCR), in situ hybridization (e.g., fluorescent in situ hybridization (FISH)), dot-blot analysis, differential display, serial analysis of gene expression, subtractive hybridization, microarrays, nanostring, and/or sequencing (e.g., next-generation sequencing). In some cases, expression of one or more genes can be measured by detecting the level of proteins encoded by the genes. For example, expression of one or more genes can be measured by protein immunostaining, protein immunoprecipitation, electrophoresis (e.g., SDS-PAGE), Western blotting, bicinchoninic acid assay, spectrophotometry, mass spectrometry, enzyme assays (e.g., enzyme-linked immunosorbent assays), immunohistochemistry, flow cytometry, and/or immunoctyochemistry. Expression of one or more genes can also be measured by microscopy. The microscopy can be optical, electron, or scanning probe microscopy. Optical microscopy can comprise use of bright field, oblique illumination, cross-polarized light, dispersion staining, dark field, phase contrast, differential interference contrast, interference reflection microscopy, fluorescence (e.g., when particles, e.g., cells, are immunostained), confocal, single plane illumination microscopy, light sheet fluorescence microscopy, deconvolution, or serial time-encoded amplified microscopy. Expression of MHC I molecules can also be detected by any methods for testing expression as described herein.

### Disrupted Genes

[0121] The inventors have found that cells, organs, and/or tissues having different combinations of disrupted genes, can result in cells, organs, and/or tissues that are less susceptible to rejection when transplanted into a recipient. For example, the inventors have found that disrupting (e.g., reducing expression of) certain genes, such as NLRC5, TAP1, GGTA1, B4GALNT2, CMAH, CXCL10, MICA, MICB, C3, and/or CIITA, can increase the likelihood of graft survival.

[0122] However, the disruptions are not limited to solely these genes. The disruption can be of any particular gene. It is contemplated that genetic homologues (e.g., any mammalian version of the gene) of the genes within this applications are covered. For example, genes that are disrupted can exhibit a certain identity and/or homology to genes disclosed herein, e.g., NLRC5, TAP1, GGTA1, B4GALNT2, CMAH, CXCL10, MICA, MICB, C3, and/or CIITA. Therefore, it is contemplated that a gene that exhibits at least or at least about 50%, 55%, 60%, 65%, 70%, 75%, 80%, 85%, 90%, 95%, 99%, or 100% homology (at the nucleic acid or protein level) can be disrupted, e.g., a gene that exhibits at least or at least about from 50% to 60%; 60% to 70%; 70% to 80%; 80% to 90%; or 90% to 99% homology. It is also contemplated that a gene that exhibits at least or at least about 50%, 55%, 60%, 65%, 70%, 75%, 80%, 85%, 90%, 99%, or 100% identity (at the nucleic acid or protein level) can be disrupted, e.g., a gene that exhibits at least or at least about from 50% to 60%; 60% to 70%; 70% to 80%; 80% to 90%; or 90% to 99% identity. Some genetic homologues are known in the art, however, in some cases, homologues are unknown. However, homologous genes between mammals can be found by comparing nucleic acid (DNA or RNA) sequences or protein sequences using publically available databases such as NCBI BLAST. Genomic sequences, cDNA and protein sequences of exemplary genes are shown in Table 1.

[0123] Gene suppression can also be done in a number of ways. For example, gene expression can be reduced by knock out, altering a promoter of a gene, and/or by administering interfering RNAs (knockdown). This can be done at an organism level or at a tissue, organ, and/or cellular level. If one or more genes are knocked down in a non-human animal, cell, tissue, and/or organ, the one or more genes can be reduced by administrating RNA interfering reagents, e.g., siRNA, shRNA, or microRNA. For example, a nucleic acid which can express shRNA can be stably transfected into a cell to knockdown expression. Furthermore, a nucleic acid which can express shRNA can be inserted into the genome of a non-human animal, thus knocking down a gene with in a non-human animal.

[0124] Disruption methods can also comprise overexpressing a dominant negative protein. This method can result in overall decreased function of a functional wild-type gene. Additionally, expressing a dominant negative gene can result in a phenotype that is similar to that of a knockout and/or knockdown.

[0125] Sometimes a stop codon can be inserted or created (e.g., by nucleotide replacement), in one or more genes, which can result in a nonfunctional transcript or protein (sometimes referred to as knockout). For example, if a stop codon is created within the middle of one or more genes, the resulting transcription and/or protein can be truncated, and can be nonfunctional. However, in some cases, truncation can lead to an active (a partially or overly active) protein. In some cases, if a protein is overly active, this can result in a dominant negative protein, e.g., a mutant polypeptide that disrupts the activity of the wild-type protein.

[0126] This dominant negative protein can be expressed in a nucleic acid within the control of any promoter. For example, a promoter can be a ubiquitous promoter. A promoter can also be an inducible promoter, tissue specific promoter, and/or developmental specific promoter.

[0127] The nucleic acid that codes for a dominant negative protein can then be inserted into a cell or non-human animal. Any known method can be used. For example, stable transfection can be used. Additionally, a nucleic acid that codes for a dominant negative protein can be inserted into a genome of a non-human animal.

[0128] One or more genes in a non-human animal can be knocked out using any method known in the art. For example, knocking out one or more genes can comprise deleting one or more genes from a genome of a non-human animal. Knocking out can also comprise removing all or a part of a gene sequence from a non-human animal. It is also contemplated that knocking out can comprise replacing all or a part of a gene in a genome of a non-human animal with one or more nucleotides. Knocking out one or more genes can also comprise inserting a sequence in one or more genes thereby disrupting expression of the one or more genes. For example, inserting a sequence can generate a stop codon in the middle of one or more genes. Inserting a sequence can also shift the open reading frame of one or more genes.

[0129] Knockout can be done in any cell, organ, and/or tissue in a non-human animal. For example, knockout can be whole body knockout, e.g., expression of one or more genes is reduced in all cells of a non-human animal. Knockout can also be specific to one or more cells, tissues, and/or organs of a non-human animal. This can be achieved by conditional knockout, where expression of one or more genes is selectively reduced in one or more organs, tissues or types of cells. Conditional knockout can be performed by a Cre-lox system, where cre is expressed under the control of a cell, tissue, and/or organ specific promoter. For example, one or more genes can be knocked out (or expression can be reduced) in one or more tissues, or organs, where the one or more tissues or organs can include brain, lung, liver, heart, spleen, pancreas, small intestine, large intestine, skeletal muscle, smooth muscle, skin, bones, adipose tissues, hairs, thyroid, trachea, gall bladder, kidney, ureter, bladder, aorta, vein, esophagus, diaphragm, stomach, rectum, adrenal glands, bronchi, ears, eyes, retina, genitals, hypothalamus, larynx, nose, tongue, spinal cord, or ureters, uterus, ovary, testis, and/or any combination thereof. One or more genes can also be knocked out (or expression can be reduced) in one types of cells, where one or more types of cells include trichocytes, keratinocytes, gonadotropes, corticotropes, thyrotropes, somatotropes, lactotrophs, chromaffin cells, parafollicular cells, glomus cells melanocytes, nevus cells, merkel cells, odontoblasts, cementoblasts corneal keratocytes, retina muller cells, retinal pigment epithelium cells, neurons, glias (e.g., oligodendrocyte astrocytes), ependymocytes, pinealocytes, pneumocytes (e.g., type I pneumocytes, and type II pneumocytes), clara cells, goblet cells, G cells, D cells, Enterochromaffin-like cells, gastric chief cells, parietal cells, foveolar cells, K cells, D cells, I cells, goblet cells, paneth cells, enterocytes, microfold cells, hepatocytes, hepatic stellate cells (e.g., Kupffer cells from mesoderm), cholecystocytes, centroacinar cells, pancreatic stellate cells, pancreatic α cells, pancreatic β cells, pancreatic δ cells, pancreatic F cells, pancreatic cells, thyroid (e.g., follicular cells), parathyroid (e.g., parathyroid chief cells), oxyphil cells, urothelial cells, osteoblasts, osteocytes, chondroblasts, chondrocytes, fibroblasts, fibrocytes, myoblasts, myocytes, myosatellite cells, tendon cells, cardiac muscle cells, lipoblasts, adipocytes, interstitial cells of cajal, angioblasts, endothelial cells, mesangial cells (e.g., intraglomerular mesangial cells and extraglomerular mesangial cells), juxtaglomerular cells, macula densa cells, stromal cells, interstitial cells, telocytes simple epithelial cells, podocytes, kidney proximal tubule brush border cells, sertoli cells, leydig cells, granulosa cells, peg cells, germ cells, spermatozoon ovums, lymphocytes, myeloid cells, endothelial progenitor cells, endothelial stem cells, angioblasts, mesoangioblasts, pericyte mural cells, and/or any combination thereof.

[0130] Conditional knockouts can be inducible, for example, by using tetracycline inducible promoters, development specific promoters. This can allow for eliminating or suppressing expression of a gene/protein at any time or at a specific time. For example, with the case of a tetracycline inducible promoter, tetracycline can be given to a non-human animal any time after birth. If a non-human animal is a being that develops in a womb, then promoter can be induced by giving tetracycline to the mother during pregnancy. If a non-human animal develops in an egg, a promoter can be induced by injecting, or incubating in tetracycline. Once tetracycline is given to a non-human animal, the tetracycline will result in expression of cre, which will then result in excision of a gene of interest.

[0131] A cre/lox system can also be under the control of a developmental specific promoter. For example, some promoters are turned on after birth, or even after the onset of puberty. These promoters can be used to control cre expression, and therefore can be used in developmental specific knockouts.

[0132] It is also contemplated that any combinations of knockout technology can be combined. For example, tissue specific knockout can be combined with inducible technology, creating a tissue specific, inducible knockout. Furthermore, other systems such developmental specific promoter, can be used in combination with tissues specific promoters, and/or inducible knockouts.

[0133] Knocking out technology can also comprise gene editing. For example, gene editing can be performed using a nuclease, including CRISPR associated proteins (Cas proteins, e.g., Cas9), Zinc finger nuclease (ZFN), Transcription Activator-Like Effector Nuclease (TALEN), and maganucleases. Nucleases can be naturally existing nucleases, genetically modified, and/or recombinant. For example, a CRISPR/cas system can be suitable as a gene editing system.

[0134] It is also contemplated that less than all alleles of one or more genes of a non-human animal can be knocked out. For example, in diploid non-human animals, it is contemplated that one of two alleles are knocked out. This can result in decreased expression and decreased protein levels of genes. Overall decreased expression can be less than or less than about 99%, 95%, 90%, 85%, 80%, 75%, 70%, 65%, 60%, 55%, 50%, 45%, 40%, 35%, 30%, 25%, or 20%; e.g., from or from about 99% to 90%; 90% to 80%; 80% to 70%; 70% to 60%; 60% to 50%; 50% to 40%; 40% to 30%, or 30% to 20%; compared to when both alleles are functioning, for example, not knocked out and/or knocked down. Additionally, overall decrease in protein level can be the same as the decreased in overall expression. Overall decrease in protein level can be about or less than about 99%, 95%, 90%, 80%, 70%, 60%, 50%, 40%, 30%, or 20%, e.g., from or from about 99% to 90%; 90% to 80%; 80% to 70%; 70% to 60%; 60% to 50%; 50% to 40%; 40% to 30%, or 30% to 20%; compared to when both alleles are functioning, for example, not knocked out and/or knocked down. However, it is also contemplated that all alleles of one or more genes in a non-human animal can be knocked out.

[0135] Knocking out of one or more genes can be validated by genotyping. Methods for genotyping can include sequencing, restriction fragment length polymorphism identification (RFLPI), random amplified polymorphic detection (RAPD), amplified fragment length polymorphism detection (AFLPD), PCR (e.g., long range PCR, or stepwise PCR), allele specific oligonucleotide (ASO) probes, and hybridization to DNA microarrays or beads. For example, genotyping can be performed by sequencing. In some cases, sequencing can be high fidelity sequencing. Methods of sequencing can include Maxam-Gilbert sequencing, chain-termination methods (e.g., Sanger sequencing), shotgun sequencing, and bridge PCR. In some cases, genotyping can be performed by next-generation sequencing. Methods of next-generation sequencing can include massively parallel signature sequencing, polony sequencing, pyrosequencing (e.g., pyrosequencing developed by 454 Life Sciences), single-molecule rea-time sequencing (e.g., by Pacific Biosciences), Ion semiconductor sequencing (e.g., by Ion Torrent semiconductor sequencing), sequencing by synthesis (e.g., by Solexa sequencing by Illumina), sequencing by ligation (e.g., SOLiD sequencing by Applied Biosystems), DNA nanoball sequencing, and heliscope single molecule sequencing. In some cases, genotyping of a non-human animal herein can comprise full genome sequencing analysis. In some cases, knocking out of a gene in an animal can be validated by sequencing (e.g., next-generation sequencing) a part of the gene or the entire gene. For example, knocking out of NLRC5 gene in a pig can be validated by next generation sequencing of the entire NLRC5. The next generation sequencing of NLRC5 can be performed using e.g. using forward primer 5′-gctgtggcatatggcagttc-3′ (SEQ ID No. 1) and reverse primer 5′-tccatgtataagtctttta-3′ (SEQ ID No. 2), or forward primer 5′-ggcaatgccagatcctcaac-3′ (SEQ ID No. 3) and reverse primer 5′-tgtctgatgtctttctcatg-3′ (SEQ ID No. 4).

TABLE 1
Genomic sequences, cDNA and proteins of exemplary disrupted genes

| | Genomic | | | | |
|---|---|---|---|---|---|
| | sequence | cDNA | | | |
| | SEQ ID | SEQ ID | | protein | |
| Gene | No. | No. | Accession No. | SEQ ID No. | Accession No. |
| NLRC5 | 5 | 6 | KC514136.1 | 7 | AGG68119.1 |
| TAP1 | 8 | 9 | NM_001044581 | 10 | NP_001038046.1 |
| GGTA1 | 11 | 12 | AF221508 | 13 | NP_998975.1 |
| CMAH | 14 | 15 | NM_001113015 | 16 | NP_001106486.1 |
| CXCL10 | 17 | 18 | NM_001008691.1 | 19 | NP_001008691.1 |
| CIITA | 20 | 21 | XM_013995652.1 | 22 | XP_013851106.1 |
| B4GALNT2 | 23 | 24 | NM_001244330.1 | 25 | NP_001231259.1 |
| C3 | 26 | 27 | NM_214009.1 | 28 | NP_999174.1 |
| MICA | 29 | 30 | NM_000247.2 | 31 | NP_000238.1 |
| MICB | 32 | 33 | NM_001289160.1 | 34 | NP_001276089.1 |

### Transgenes

[0136] Transgenes can be useful for overexpressing endogenous genes at higher levels than without the transgenes. Additionally, transgenes can be used to express exogenous genes. Transgenes can also encompass other types of genes, for example, a dominant negative gene.

[0137] A transgene of protein X can refer to a transgene comprising a nucleotide sequence encoding protein X. As used herein, in some cases, a transgene encoding protein X can be a transgene encoding 100% or about 100% of the amino acid sequence of protein X. In some cases, a transgene encoding protein X can encode the full or partial amino sequence of protein X. For example, the transgene can encode at least or at least about 99%, 95%, 90%, 80%, 70%, 60%, 50%, 40%, 30%, 20%, 10%, or 5%, e.g., from or from about 99% to 90%; 90% to 80%; 80% to 70%; 70% to 60%; or 60% to 50%; of the amino acid sequence of protein X. Expression of a transgene can ultimately result in a functional protein, e.g., a partially or fully functional protein. As discussed above, if a partial sequence is expressed, the ultimate result can be in some cases a nonfunctional protein or a dominant negative protein. A nonfunctional protein or dominant negative protein can also compete with a functional (endogenous or exogenous) protein. A transgene can also encode an RNA (e.g., mRNA, shRNA, siRNA, or microRNA). In some cases, where a transgene encodes for an mRNA, this can in turn be translated into a polypeptide (e.g., a protein). Therefore, it is contemplated that a transgene can encode for protein. A transgene can, in some instances, encode a protein or a portion of a protein. Additionally, a protein can have one or more mutations (e.g., deletion, insertion, amino acid replacement, or rearrangement) compared to a wild-type polypeptide. A protein can be a natural polypeptide or an artificial polypeptide (e.g., a recombinant polypeptide). A transgene can encode a fusion protein formed by two or more polypeptides.

[0138] Transgenes can be placed into an organism, cell, tissue, or organ, in a manner which produces a product of the transgene. For example, disclosed herein is a non-human animal comprising one or more transgenes. One or more transgenes can be in combination with one or more disruptions as described herein. A transgene can be incorporated into a cell. For example, a transgene can be incorporated into an organism's germ line. When inserted into a cell, a transgene can be either a complementary DNA (cDNA) segment, which is a copy of messenger RNA (mRNA), or a gene itself residing in its original region of genomic DNA (with or without introns).

[0139] A non-human animal can comprise one or more transgenes comprising one or more polynucleotide inserts. The polynucleotide inserts can encode one or proteins or functional fragments thereof. In some cases, a non-human animal can comprise one or more transgenes comprising one or more polynucleotide inserts encoding proteins that can reduce expression and/or function of MHC molecules (e.g., MHC I molecules and/or MHC II molecules). The one or more transgenes can comprise one or more polynucleotide inserts encoding MHC I formation suppressors, regulators of complement activations, inhibitory ligands for NK cells, B7 family members, CD47, serine protease inhibitors, galectins, and/or any fragments thereof. In some cases, the MHC I formation suppressors can be infected cell protein 47 (ICP47). In some cases, regulators of complement activation can comprise cluster of differentiation 46 (CD46), cluster of differentiation 55 (CD55), and cluster of differentiation 59 (CD59). In some cases, inhibitory ligands for NK cells can comprise leukocyte antigen E (HLA-E), human leukocyte antigen G (HLA-G), and β-2-microglobulin (B2M). An inhibitory ligand for NK cells can be an isoform of HLA-G, e.g., HLA-G1, HLA-G2, HLA-G3, HLA-G4, HLA-G5, HLA-G6, or HLA-G7. For example, inhibitory ligand for NK cells can be HLA-G1. A transgene of HLA-G (e.g., HLA-G1, HLA-G2, HLA-G3, HLA-G4, HLA-G5, HLA-G6, or HLA-G7) can refer to a transgene comprising a nucleotide sequence encoding HLA-G (e.g., HLA-G1, HLA-G2, HLA-G3, HLA-G4, HLA-G5, HLA-G6, or HLA-G7). As used herein, in some cases, a transgene encoding HLA-G (e.g., HLA-G1, HLA-G2, HLA-G3, HLA-G4, HLA-G5, HLA-G6, or HLA-G7) can be a transgene encoding 100% or about 100% of the amino acid sequence of HLA-G (e.g., HLA-G1, HLA-G2, HLA-G3, HLA-G4, HLA-G5, HLA-G6, or HLA-G7). In other cases, a transgene encoding HLA-G (e.g., HLA-G1, HLA-G2, HLA-G3, HLA-G4, HLA-G5, HLA-G6, or HLA-G7) can be a transgene encoding the full or partial sequence of HLA-G (e.g., HLA-G1, HLA-G2, HLA-G3, HLA-G4, HLA-G5, HLA-G6, or HLA-G7). For example, the transgene can encode at least or at least about 99%, 95%, 90%, 80%, 70%, 60%, or 50% of the amino acid sequence of HLA-G (e.g., HLA-G1, HLA-G2, HLA-G3, HLA-G4, HLA-G5, HLA-G6, or HLA-G7). For example, the transgene can encode 90% of the HLA-G amino acid sequence. A transgene can comprise polynucleotides encoding a functional (e.g., a partially or fully functional) HLA-G (e.g., HLA-G1, HLA-G2, HLA-G3, HLA-G4, HLA-G5, HLA-G6, or HLA-G7). In some cases, the one or more transgenes can comprise one or more polynucleotide inserts encoding one or more of ICP47, CD46, CD55, CD59, HLA-E, HLA-G (e.g., HLA-G1, HLA-G2, HLA-G3, HLA-G4, HLA-G5, HLA-G6, or HLA-G7), and B2M. The HLA-G genomic DNA sequence can have 8 exons by which alternative splicing results in 7 isoforms. The HLA-G1 isoform can exclude exon 7. The HLA-G2 isoform can exclude exon 3 and 7. Translation of intron 2 or intron 4 can result secreted isoforms due to the loss of the transmembrane domain expression. The maps of the genomic sequence and cDNA of HLA-G are shown in FIGS. 14A-14B. In some cases, B7 family members can comprise CD80, CD86, programmed death-ligand 1 (PD-L1), programmed death-ligand 2 (PD-L2), CD275, CD276, V-set domain containing T cell activation inhibitor 1 (VTCN1), platelet receptor Gi24, natural cytotoxicity triggering receptor 3 ligand 1 (NR3L1), and HERV-H LTR-associating 2 (HHLA2). For example, a B7 family member can be PD-L1 or PD-L2. In some cases, a serine protease inhibitor can be serine protease inhibitor 9 (Spi9). In some cases, galectins can comprise galectin-1, galectin-2, galectin-3, galectin-4, galectin-5, galectin-6, galectin-7, galectin-8, galectin-9, galectin-10, galectin-11, galectin-12, galectin-13, galectin-14, and galectin-15. For example, a galectin can be galectin-9.

[0140] A genetically modified non-human animal can comprise reduced expression of one or more genes and one or more transgenes disclosed herein. In some cases, a genetically modified non-human animal can comprise reduced expression of one or more of NLRC5, TAP1, CXCL10, MICA, MICB, C3, CIITA, GGTA1, CMAH, and B4GALNT2, and one or more transgenes comprising one or more polynucleotide inserts encoding one or more of ICP47, CD46, CD55, CD59, HLA-E, HLA-G (e.g., HLA-G1, HLA-G2, HLA-G3, HLA-G4, HLA-G5, HLA-G6, or HLA-G7), B2M, PD-L1, PD-L2, CD47, Spi9, and galectin-9. In some cases, a genetically modified non-human animal can comprise reduced expression GGTA1, CMAH, and B4GALNT2, and exogenous polynucleotides encoding HLA-G (e.g., HLA-G1, HLA-G2, HLA-G3, HLA-G4, HLA-G5, HLA-G6, or HLA-G7), CD47 (e.g., human CD47), PD-L1 (e.g., human PD-L1), and PD-L2 (e.g., human PD-L2). In some cases, a genetically modified non-human animal can comprise reduced expression GGTA1, CMAH, and B4GALNT2, and exogenous polynucleotides encoding HLA-E, CD47 (e.g., human CD47), PD-L1 (e.g., human PD-L1), and PD-L2 (e.g., human PD-L2). In some cases, a genetically modified non-human animal can comprise reduced expression NLRC5, C3, CXC10, GGTA1, CMAH, and B4GALNT2, and exogenous polynucleotides encoding HLA-G (e.g., HLA-G1, HLA-G2, HLA-G3, HLA-G4, HLA-G5, HLA-G6, or HLA-G7), CD47 (e.g., human CD47), PD-L1 (e.g., human PD-L1), and PD-L2 (e.g., human PD-L2). In some cases, a genetically modified non-human animal can comprise reduced expression TAP1, C3, CXC10GGTA1, CMAH, and B4GALNT2, and exogenous polynucleotides encoding HLA-G (e.g., HLA-G1, HLA-G2, HLA-G3, HLA-G4, HLA-G5, HLA-G6, or HLA-G7), CD47 (e.g., human CD47), PD-L1 (e.g., human PD-L1), and PD-L2 (e.g., human PD-L2). In some cases, a genetically modified non-human animal can comprise reduced expression NLRC5, C3, CXC10, GGTA1, CMAH, and B4GALNT2, and exogenous polynucleotides encoding HLA-E, CD47 (e.g., human CD47), PD-L1 (e.g., human PD-L1), and PD-L2 (e.g., human PD-L2). In some cases, a genetically modified non-human animal can comprise reduced expression TAP1, C3, CXC10, GGTA1, CMAH, and B4GALNT2, and exogenous polynucleotides encoding HLA-E. In some cases, a genetically modified non-human animal can comprise reduced expression of GGTA1 and a transgene comprising one or more polynucleotide inserts encoding HLA-E. In some cases, a genetically modified non-human animal can comprise reduced expression of GGTA1 and a transgene comprising one or more polynucleotide inserts encoding HLA-G (e.g., HLA-G1, HLA-G2, HLA-G3, HLA-G4, HLA-G5, HLA-G6, or HLA-G7). In some cases, a genetically modified non-human animal can comprise a transgene comprising one or more polynucleotide inserts encoding HLA-G (e.g., HLA-G1, HLA-G2, HLA-G3, HLA-G4, HLA-G5, HLA-G6, or HLA-G7) inserted adjacent to a Rosa26 promoter, e.g., a porcine Rosa26 promoter. In some cases, a genetically modified non-human animal can comprise reduced expression of NLRC5, C3, GGTA1, CMAH, and B4GALNT2, and transgenes comprising polynucleotides encoding proteins or functional fragments thereof, where the proteins comprise HLA-G1, Spi9, PD-L1, PD-L2, CD47, and galectin-9. In some cases, a genetically modified non-human animal can comprise reduced expression of TAP1, C3, GGTA1, CMAH, and B4GALNT2, and transgenes comprising polynucleotides encoding proteins or functional fragments thereof, where the proteins comprise HLA-G1, Spi9, PD-L1, PD-L2, CD47, and galectin-9. In some cases, a genetically modified non-human animal can comprise reduced expression of NLRC5, TAP1, C3, GGTA1, CMAH, and B4GALNT2, and transgenes comprising polynucleotides encoding proteins or functional fragments thereof, where the proteins comprise HLA-G1, Spi9, PD-L1, PD-L2, CD47, and galectin-9. In some cases, a genetically modified non-human animal can comprise reduced protein expression of NLRC5, C3, GGTA1, and CXCL10, and transgenes comprising polynucleotides encoding proteins or functional fragments thereof, where the protein comprise HLA-G1 or HLA-E. In some cases, a genetically modified non-human animal can comprise reduced protein expression of TAP1, C3, GGTA1, and CXCL10, and transgenes comprising polynucleotides encoding proteins or functional fragments thereof, where the protein comprise HLA-G1 or HLA-E. In some cases, a genetically modified non-human animal can comprise reduced protein expression of NLRC5, TAP1, C3, GGTA1, and CXCL10, and transgenes comprising polynucleotides encoding proteins or functional fragments thereof, where the protein comprise HLA-G1 or HLA-E. In some cases, CD47, PD-L1, and PD-L2 encoded by the transgenes herein can be human CD47, human PD-L1 and human PD-L2.

[0141] A genetically modified non-human animal can comprise a transgene inserted in a locus in the genome of the animal. In some cases, a transgene can be inserted adjacent to the promoter of or inside a targeted gene. In some cases, insertion of the transgene can reduce the expression of the targeted gene. The targeted gene can be a gene whose expression is reduced disclosed herein. For example, a transgene can be inserted adjacent to the promoter of or inside one or more of NLRC5, TAP1, CXCL10, MICA, MICB, C3, CIITA, GGTA1, CMAH, and B4GALNT2. In some cases, a transgene can be inserted adjacent to the promoter of or inside GGTA1.

[0142] For example, a non-human animal can comprise one or more transgenes comprising one or more polynucleotide inserts of Infected cell protein 47 (ICP47), Cluster of differentiation 46 (CD46), Cluster of differentiation 55 (CD55), Cluster of differentiation 59 (CD 59), HLA-E, HLA-G (e.g., HLA-G1, HLA-G2, HLA-G3, HLA-G4, HLA-G5, HLA-G6, or HLA-G7), B2M, Spi9, PD-L1, PD-L2, CD47, galectin-9, any functional fragments thereof, or any combination thereof. Polynucleotide encoding for ICP47, CD46, CD55, CD59, HLA-E, HLA-G (e.g., HLA-G1, HLA-G2, HLA-G3, HLA-G4, HLA-G5, HLA-G6, or HLA-G7), or B2M can encode one or more of ICP47, CD46, CD55, CD59, HLA-E, HLA-G (e.g., HLA-G1, HLA-G2, HLA-G3, HLA-G4, HLA-G5, HLA-G6, or HLA-G7), B2M, Spi9, PD-L1, PD-L2, CD47, or galectin-9 human proteins. A non-human animal can comprise 1, 2, 3, 4, 5, 6, 7, 8, 9, 10, 11, 12, 13, 14, 15, 16, 17, 18, 19, 20, or more transgenes. For example, a non-human animal can comprise one or more transgene comprising ICP47, CD46, CD55, CD59, HLA-E, HLA-G (e.g., HLA-G1, HLA-G2, HLA-G3, HLA-G4, HLA-G5, HLA-G6, or HLA-G7), B2M, Spi9, PD-L1, PD-L2, CD47, galectin-9, any functional fragments thereof, or any combination thereof. A non-human animal can also comprise a single transgene encoding ICP47. A non-human animal can sometimes comprise a single transgene encoding CD59. A non-human animal can sometimes comprise a single transgene encoding HLA-G (e.g., HLA-G1, HLA-G2, HLA-G3, HLA-G4, HLA-G5, HLA-G6, or HLA-G7). A non-human animal can sometimes comprise a single transgene encoding HLA-E. A non-human animal can sometimes comprise a single transgene encoding B2M. A non-human animal can also comprise two or more transgenes, where the two or more transgenes are ICP47, CD46, CD55, CD59, and/or any combination thereof. For example, two or more transgenes can comprise CD59 and CD46 or CD59 and CD55. A non-human animal can also comprise three or more transgenes, where the three or more transgenes can comprise ICP47, CD46, CD55, CD59, or any combination thereof. For example, three or more transgenes can comprise CD59, CD46, and CD55. A non-human animal can also comprise four or more transgenes, where the four or more transgenes can comprise ICP47, CD46, CD55, and CD59. A non-human animal can comprise four or more transgenes comprising ICP47, CD46, CD55, and CD59.

[0143] A combination of transgenes and gene disruptions can be used. A non-human animal can comprise one or more reduced genes and one or more transgenes. For example, one or more genes whose expression is reduced can comprise any one of NLRC5, TAP1, GGTA1, B4GALNT2, CMAH, CXCL10, MICA, MICB, C3, CIITA, and/or any combination thereof, and one or more transgene can comprise ICP47, CD46, CD55, CD 59, any functional fragments thereof, and/or any combination thereof. For example, solely to illustrate various combinations, one or more genes whose expression is disrupted can comprise NLRC5 and one or more transgenes comprise ICP47. One or more genes whose expression is disrupted can also comprise TAP1, and one or more transgenes comprise ICP47. One or more genes whose expression is disrupted can also comprise NLRC5 and TAP1, and one or more transgenes comprise ICP47. One or more genes whose expression is disrupted can also comprise NLRC5, TAP1, and GGTA1, and one or more transgenes comprise ICP47. One or more genes whose expression is disrupted can also comprise NLRC5, TAP1, B4GALNT2, and CMAH, and one or more transgenes comprise ICP47. One or more genes whose expression is disrupted can also comprise NLRC5, TAP1, GGTA1, B4GALNT2, and CMAH, and one or more transgenes comprise ICP47. One or more genes whose expression is disrupted can also comprise NLRC5 and one or more transgenes comprise CD59. One or more genes whose expression is disrupted can also comprise TAP1, and one or more transgenes comprise CD59. One or more genes whose expression is disrupted can also comprise NLRC5 and TAP1, and one or more transgenes comprise CD59. One or more genes whose expression is disrupted can also comprise NLRC5, TAP1, and GGTA1, and one or more transgenes comprise CD59. One or more genes whose expression is disrupted can also comprise NLRC5, TAP1, B4GALNT2, and CMAH, and one or more transgenes comprise CD59. One or more genes whose expression is disrupted can also comprise NLRC5, TAP1, GGTA1, B4GALNT2, and CMAH, and one or more transgenes comprise CD59.

[0144] Transgenes that can be used and are specifically contemplated can include those genes that exhibit a certain identity and/or homology to genes disclosed herein, for example, ICP47, CD46, CD55, CD59, HLA-E, HLA-G (e.g., HLA-G1, HLA-G2, HLA-G3, HLA-G4, HLA-G5, HLA-G6, or HLA-G7), B2M, Spi9, PD-L1, PD-L2, CD47, galectin-9, any functional fragments thereof, and/or any combination thereof. Therefore, it is contemplated that if gene that exhibits at least or at least about 60%, 70%, 80%, 90%, 95%, 98%, or 99% homology, e.g., at least or at least about 99% to 90%; 90% to 80%; 80% to 70%; 70% to 60% homology; (at the nucleic acid or protein level), it can be used as a transgene. It is also contemplated that a gene that exhibits at least or at least about 60%, 65%, 70%, 75%, 80%, 85%, 90%, 95%, 98%, or 99%, identity e.g., at least or at least about 99% to 90%; 90% to 80%; 80% to 70%; 70% to 60% identity; (at the nucleic acid or protein level) can be used as a transgene.

[0145] A non-human animal can also comprise 1, 2, 3, 4, 5, 6, 7, 8, 9, 10, 11, 12, 13, 14, 15, 16, 17, 18, 19, 20, or more dominant negative transgenes. Expression of a dominant negative transgenes can suppress expression and/or function of a wild type counterpart of the dominant negative transgene. Thus, for example, a non-human animal comprising a dominant negative transgene X, can have similar phenotypes compared to a different non-human animal comprising an X gene whose expression is reduced. One or more dominant negative transgenes can be dominant negative NLRC5, dominant negative TAP1, dominant negative GGTA1, dominant negative CMAH, dominant negative B4GALNT2, dominant negative CXCL10, dominant negative MICA, dominant negative MICB, dominant negative CIITA, dominant negative C3, or any combination thereof.

[0146] Also provided is a non-human animal comprising one or more transgenes that encodes one or more nucleic acids that can suppress genetic expression, e.g., can knockdown a gene. RNAs that suppress genetic expression can comprise, but are not limited to, shRNA, siRNA, RNAi, and microRNA. For example, siRNA, RNAi, and/or microRNA can be given to a non-human animal to suppress genetic expression. Further, a non-human animal can comprise one or more transgene encoding shRNAs. shRNA can be specific to a particular gene. For example, a shRNA can be specific to any gene described in the application, including but not limited to, NLRC5, TAP1, GGTA1, B4GALNT2, CMAH, CXCL10, MICA, MICB, B4GALNT2, CIITA, C3, and/or any combination thereof.

[0147] When transplanted to a subject, cells, tissues, or organs from the genetically modified non-human animal can trigger lower immune responses (e.g., transplant rejection) in the subject compared to cells, tissues, or organs from a non-genetically modified counterpart. In some cases, the immune responses can include the activation, proliferation and cytotoxicity of T cells (e.g., CD8+ T cells and/or CD4+ T cells) and NK cells. Thus, phenotypes of genetically modified cells disclosed herein can be measured by co-culturing the cells with NK cells, T cells (e.g., CD8+ T cells or CD4+ T cells), and testing the activation, proliferation and cytotoxicity of the NK cells or T cells. In some cases, the T cells or NK cells activation, proliferation and cytotoxicity induced by the genetically modified cells can be lower than that induced by non-genetically modified cells. In some cases, phenotypes of genetically modified cells herein can be measured by Enzyme-Linked ImmunoSpot (ELISPOT) assays.

[0148] One or more transgenes can be from different species. For example, one or more transgenes can comprise a human gene, a mouse gene, a rat gene, a pig gene, a bovine gene, a dog gene, a cat gene, a monkey gene, a chimpanzee gene, or any combination thereof. For example, a transgene can be from a human, having a human genetic sequence. One or more transgenes can comprise human genes. In some cases, one or more transgenes are not adenoviral genes.

[0149] A transgene can be inserted into a genome of a non-human animal in a random or site-specific manner. For example, a transgene can be inserted to a random locus in a genome of a non-human animal. These transgenes can be fully functional if inserted anywhere in a genome. For instance, a transgene can encode its own promoter or can be inserted into a position where it is under the control of an endogenous promoter. Alternatively, a transgene can be inserted into a gene, such as an intron of a gene or an exon of a gene, a promoter, or a non-coding region.

[0150] Sometimes, more than one copy of a transgene can be inserted into more than a random locus in a genome. For example, multiple copies can be inserted into a random locus in a genome. This can lead to increased overall expression than if a transgene was randomly inserted once. Alternatively, a copy of a transgene can be inserted into a gene, and another copy of a transgene can be inserted into a different gene. A transgene can be targeted so that it could be inserted to a specific locus in a genome of a non-human animal.

[0151] Expression of a transgene can be controlled by one or more promoters. A promoter can be a ubiquitous, tissue-specific promoter or an inducible promoter. Expression of a transgene that is inserted adjacent to a promoter can be regulated. For example, if a transgene is inserted near or next to a ubiquitous promoter, the transgene will be expressed in all cells of a non-human animal. Some ubiquitous promoters can be a CAGGS promoter, an hCMV promoter, a PGK promoter, an SV40 promoter, or a Rosa26 promoter.

[0152] A promoter can be endogenous or exogenous. For example, one or more transgenes can be inserted adjacent to an endogenous or exogenous Rosa26 promoter. Further, a promoter can be specific to a non-human animal. For example, one or more transgenes can be inserted adjacent to a porcine Rosa26 promoter.

[0153] Tissue specific promoter (which can be synonymous with cell-specific promoters) can be used to control the location of expression. For example, one or more transgenes can be inserted adjacent to a tissue-specific promoter. Tissue-specific promoters can be a FABP promoter, a Lck promoter, a CamKII promoter, a CD19 promoter, a Keratin promoter, an Albumin promoter, an aP2 promoter, an insulin promoter, an MCK promoter, an MyHC promoter, a WAP promoter, or a Col2A promoter. For example, a promoter can be a pancreas-specific promoter, e.g., an insulin promoter.

[0154] Inducible promoters can be used as well. These inducible promoters can be turned on and off when desired, by adding or removing an inducing agent. It is contemplated that an inducible promoter can be a Lac, tac, trc, trp, araBAD, phoA, recA, proU, cst-1, tetA, cadA, nar, PL, cspA, T7, VHB, Mx, and/or Trex.

[0155] A non-human animal or cells as described herein can comprise a transgene encoding insulin. A transgene encoding insulin can be a human gene, a mouse gene, a rat gene, a pig gene, a cattle gene, a dog gene, a cat gene, a monkey gene, a chimpanzee gene, or any other mammalian gene. For example, a transgene encoding insulin can be a human gene. A transgene encoding insulin can also be a chimeric gene, for example, a partially human gene.

[0156] Expression of transgenes can be measured by detecting the level of transcripts of the transgenes. For example, expression of transgenes can be measured by Northern blotting, nuclease protection assays (e.g., RNase protection assays), reverse transcription PCR, quantitative PCR (e.g., real-time PCR such as real-time quantitative reverse transcription PCR), in situ hybridization (e.g., fluorescent in situ hybridization (FISH)), dot-blot analysis, differential display, Serial analysis of gene expression, subtractive hybridization, microarrays, nanostring, and/or sequencing (e.g., next-generation sequencing). In some cases, expression of transgenes can be measured by detecting proteins encoded by the genes. For example, expression of one or more genes can be measured by protein immunostaining, protein immunoprecipitation, electrophoresis (e.g., SDS-PAGE), Western blotting, bicinchoninic acid assay, spectrophotometry, mass spectrometry, enzyme assays (e.g., enzyme-linked immunosorbent assays), immunohistochemistry, flow cytometry, and/or immunocytochemistry. In some cases, expression of transgenes can be measured by microscopy. The microscopy can be optical, electron, or scanning probe microscopy. In some cases, optical microscopy comprises use of bright field, oblique illumination, cross-polarized light, dispersion staining, dark field, phase contrast, differential interference contrast, interference reflection microscopy, fluorescence (e.g., when particles, e.g., cells, are immunostained), confocal, single plane illumination microscopy, light sheet fluorescence microscopy, deconvolution, or serial time-encoded amplified microscopy.

[0157] Insertion of transgenes can be validated by genotyping. Methods for genotyping can include sequencing, restriction fragment length polymorphism identification (RFLPI), random amplified polymorphic detection (RAPD), amplified fragment length polymorphism detection (AFLPD), PCR (e.g., long range PCR, or stepwise PCR), allele specific oligonucleotide (ASO) probes, and hybridization to DNA microarrays or beads. In some cases, genotyping can be performed by sequencing. In some cases, sequencing can be high fidelity sequencing. Methods of sequencing can include Maxam-Gilbert sequencing, chain-termination methods (e.g., Sanger sequencing), shotgun sequencing, and bridge PCR. In some cases, genotyping can be performed by next-generation sequencing. Methods of next-generation sequencing can include massively parallel signature sequencing, polony sequencing, pyrosequencing (e.g., pyrosequencing developed by 454 Life Sciences), single-molecule rea-time sequencing (e.g., by Pacific Biosciences), Ion semiconductor sequencing (e.g., by Ion Torrent semiconductor sequencing), sequencing by synthesis (e.g., by Solexa sequencing by Illumina), sequencing by ligation (e.g., SOLiD sequencing by Applied Biosystems), DNA nanoball sequencing, and heliscope single molecule sequencing. In some cases, genotyping of a non-human animal herein can comprise full genome sequencing analysis.

[0158] In some cases, insertion of a transgene in an animal can be validated by sequencing (e.g., next-generation sequencing) a part of the transgene or the entire transgene. For example, insertion of a transgene adjacent to a Rosa26 promoter in a pig can be validated by next generation sequencing of Rosa exons 1 to 4, e.g., using the forward primer 5′-cgcctagagaagaggctgtg-3′ (SEQ ID No. 35), and reverse primer 5′-ctgctgtggctgtggtgtag-3′ (SEQ ID No. 36).

TABLE 2
cDNA sequences of exemplary transgenes

| SEQ ID No. | Gene | Accession No. |
|---|---|---|
| 37 | CD46 | NM_213888 |
| 38 | CD55 | AF228059.1 |
| 39 | CD59 | AF020302 |
| 40 | ICP47 | EU445532.1 |
| 41 | HLA-G1 | NM_002127.5 |
| 42 | HLA-E | NM_005516.5 |
| 43 | Human β-2-microglobulin | NM_004048.2 |
| 44 | Human PD-L1 | NM_001267706.1 |
| 45 | Human PD-L2 | NM_025239.3 |
| 46 | Human Spi9 | NM_004155.5 |
| 47 | Human CD47 | NM_001777.3 |
| 48 | Human galectin-9 | NM_009587.2 |

TABLE 3
Sequences of proteins encoded by exemplary transgenes

| SEQ ID No. | Protein | Accession No. |
|---|---|---|
| 49 | CD46 | NP_999053.1 |
| 50 | CD55 | AAG14412.1 |
| 51 | CD59 | AAC67231.1 |
| 52 | ICP47 | ACA28836.1 |
| 53 | HLA-G1 | NP_002118.1 |
| 54 | HLA-E | NP_005507.3 |
| 55 | Human β-2-microglobulin | NP_004039.1 |
| 56 | Human PD-L1 | NP_001254635.1 |
| 57 | Human PD-L2 | NP_079515.2 |
| 58 | Human Spi9 | NP_004146.1 |
| 59 | Human CD47 | NP_001768.1 |
| 60 | Human galectin-9 | NP_033665.1 |

### Populations of Non-Human Animals

[0159] Provided herein is a single non-human animal and also a population of non-human animals. A population of non-human animals can be genetically identical. A population of non-human animals can also be phenotypical identical. A population of non-human animals can be both phenotypical and genetically identical.

[0160] Further provided herein is a population of non-human animals, which can be genetically modified. For example, a population can comprise at least or at least about 2, 5, 10, 50, 100, or 200, non-human animals as disclosed herein. The non-human animals of a population can have identical phenotypes. For example, the non-human animals of a population can be clones. A population of non-human animal can have identical physical characteristics. The non-human animals of a population having identical phenotypes can comprise a same transgene(s). The non-human animals of a population having identical phenotypes can also comprise a same gene(s) whose expression is reduced. The non-human animals of a population having identical phenotypes can also comprise a same gene(s) whose expression is reduced and comprise a same transgene(s). A population of non-human animals can comprise at least or at least about 2, 5, 10, 50, 100, or 200, non-human animals having identical phenotypes. For example, the phenotypes of any particular litter can have the identical phenotype (e.g., in one example, anywhere from 1 to about 20 non-human animals). The non-human animals of a population can be pigs having identical phenotypes.

[0161] The non-human animals of a population can have identical genotypes. For example, all nucleic acid sequences in the chromosomes of non-human animals in a population can be identical. The non-human animals of a population having identical genotypes can comprise a same transgene(s). The non-human animals of a population having identical genotypes can also comprise a same gene(s) whose expression is reduced. The non-human animals of a population having identical genotypes can also comprise a same gene(s) whose expression is reduced and comprise a same transgene(s). A population of non-human animals can comprise at least or at least about 2, 5, 50, 100, or 200 non-human animals having identical genotypes. The non-human animals of a population can be pigs having identical genotypes.

[0162] Cells from two or more non-human animals with identical genotypes and/or phenotypes can be used in a tolerizing vaccine. In some cases, a tolerizing vaccine disclosed herein can comprise a plurality of the cells (e.g., genetically modified cells) from two or more non-human animals (e.g., pigs) with identical genotypes and/or phenotypes. A method for immunotolerizing a recipient to a graft can comprise administering to the recipient a tolerizing vaccine comprising a plurality of cells (e.g., genetically modified cells) from two or more non-human animals with identical genotypes or phenotypes.

[0163] Cells from two or more non-human animals with identical genotypes and/or phenotypes can be used in transplantation. In some cases, a graft (e.g., xenograft or allograft) can comprise a plurality of cells from two or more non-human animals with identical genotypes and/or phenotypes. In embodiments of the methods described herein, e.g., a method for treating a disease in a subject in need thereof, can comprise transplanting a plurality of cells (e.g., genetically modified cells) from two or more non-human animals with identical genotypes and/or phenotypes.

[0164] Populations of non-human animals can be generated using any method known in the art. In some cases, populations of non-human animals can be generated by breeding. For example, inbreeding can be used to generate a phenotypically or genetically identical non-human animal or population of non-human animals. Inbreeding, for example, sibling to sibling or parent to child, or grandchild to grandparent, or great grandchild to great grandparent, can be used. Successive rounds of inbreeding can eventually produce a phenotypically or genetically identical non-human animal. For example, at least or at least about 2, 3, 4, 5, 10, 20, 30, 40, or 50 generations of inbreeding can produce a phenotypically and/or a genetically identical non-human animal. It is thought that after 10-20 generations of inbreeding, the genetic make-up of a non-human animal is at least 99% pure. Continuous inbreeding can lead to a non-human animal that is essentially isogenic, or close to isogenic as a non-human animal can be without being an identical twin.

[0165] Breeding can be performed using non-human animals that have the same genotype. For example, the non-human animals have the same gene(s) whose expression is reduced and/or carry the same transgene(s). Breeding can also be performed using non-human animals having different genotypes. Breeding can be performed using a genetically modified non-human animal and non-genetically modified non-human animal, for example, a genetically modified female pig and a wild-type male pig, or a genetically modified male pig and a wild-type female pig. All these combinations of breeding can be used to produce a non-human animal of desire.

[0166] Populations of genetically modified non-human animals can also be generated by cloning. For example, the populations of genetically modified non-human animal cells can be asexually producing similar populations of genetically or phenotypically identical individual non-human animals. Cloning can be performed by various methods, such as twinning (e.g., splitting off one or more cells from an embryo and grow them into new embryos), somatic cell nuclear transfer, or artificial insemination. More details of the methods are provided throughout the disclosure.

### II. Genetically Modified Cells

[0167] Disclosed herein are one or more genetically modified cells that can be used to treat or prevent disease. These genetically modified cells can be from genetically modified non-human animals. For example, genetically modified non-human animals as disclosed above can be processed so that one or more cells are isolated to produce isolated genetically modified cells. These isolated cells can also in some cases be further genetically modified cells. However, a cell can be modified ex vivo, e.g., outside an animal using modified or non-modified human or non-human animal cells. For example, cells (including human and non-human animal cells) can be modified in culture. It is also contemplated that a genetically modified cell can be used to generate a genetically modified non-human animal described herein. In some cases, the genetically modified cell can be isolated from a genetically modified animal. In some cases, the genetically modified cell can be derived from a cell from a non-genetically modified animal. Isolation of cells can be performed by methods known in the art, including methods of primary cell isolation and culturing. It is specifically contemplated that a genetically modified cell is not extracted from a human.

[0168] Therefore, anything that can apply to the genetically modified non-human animals including the various methods of making as described throughout can also apply herein. For example, all the genes that are disrupted and the transgenes that are overexpressed are applicable in making genetically modified cells used herein. Further, any methods for testing the genotype and expression of genes in the genetically modified non-human animals described throughout can be used to test the genetic modification of the cells.

[0169] A genetically modified cell can be from a member of the Laurasiatheria superorder or a non-human primate. Such genetically modified cell can be isolated from a member of the Laurasiatheria superorder or a non-human primate. Alternatively, such genetically modified cell can be originated from a member of the Laurasiatheria superorder or a non-human primate. For example, the genetically modified cell can be made from a cell isolated from a member of the Laurasiatheria superorder or a non-human primate, e.g., using cell culturing or genetic modification methods.

[0170] Genetically modified cells, e.g., cells from a genetically modified animal or cells made ex vivo, can be analyzed and sorted. In some cases, genetically modified cells can be analyzed and sorted by flow cytometry, e.g., fluorescence-activated cell sorting. For example, genetically modified cells expressing a transgene can be detected and purified from other cells using flow cytometry based on a label (e.g., a fluorescent label) recognizing the polypeptide encoded by the transgene.

[0171] Stem cells, including, non-human animal and human stem cells can be used. Stem cells do not have the capability to generating a viable human being. For example, stem cells can be irreversibly differentiated so that they are unable to generate a viable human being. Stem cells can be pluripotent, with the caveat that the stem cells cannot generate a viable human.

[0172] As discussed above in the section regarding the genetically modified non-human animals, the genetically modified cells can comprise one or more genes whose expression is reduced. The same genes as disclosed above for the genetically modified non-human animals can be disrupted. For example, a genetically modified cell comprising one or more genes whose expression is disrupted, e.g., reduced, where the one or more genes comprise NLRC5, TAP1, GGTA1, B4GALNT2, CMAH, CXCL10, MICA, MICB, C3, CIITA and/or any combination thereof. Further, the genetically modified cell can comprise one or more transgenes comprising one or more polynucleotide inserts. For example, a genetically modified cell can comprise one or more transgenes comprising one or more polynucleotide inserts of ICP47, CD46, CD55, CD 59, HLA-E, HLA-G (e.g., HLA-G1, HLA-G2, HLA-G3, HLA-G4, HLA-G5, HLA-G6, or HLA-G7), B2M, Spi9, PD-L1, PD-L2, CD47, galectin-9, any functional fragments thereof, or any combination thereof. A genetically modified cell can comprise one or more reduced genes and one or more transgenes. For example, one or more genes whose expression is reduced can comprise any one of NLRC5, TAP1, GGTA1, B4GALNT2, CMAH, CXCL10, MICA, MICB, CIITA, and/or any combination thereof, and one or more transgene can comprise ICP47, CD46, CD55, CD 59, HLA-E, HLA-G (e.g., HLA-G1, HLA-G2, HLA-G3, HLA-G4, HLA-G5, HLA-G6, or HLA-G7), B2M, Spi9, PD-L1, PD-L2, CD47, galectin-9, any functional fragments thereof, and/or any combination thereof. In some cases, a genetically modified cell can comprise reduced expression of NLRC5, C3, GGTA1, CMAH, and B4GALNT2, and transgenes comprising polynucleotides encoding proteins or functional fragments thereof, where the proteins comprise HLA-G1, Spi9, PD-L1, PD-L2, CD47, and galectin-9. In some cases, a genetically modified cell can comprise reduced expression of TAP1, C3, GGTA1, CMAH, and B4GALNT2, and transgenes comprising polynucleotides encoding proteins or functional fragments thereof, where the proteins comprise HLA-G1, Spi9, PD-L1, PD-L2, CD47, and galectin-9. In some cases, a genetically modified cell can comprise reduced expression of NLRC5, TAP1, C3, GGTA1, CMAH, and B4GALNT2, and transgenes comprising polynucleotides encoding proteins or functional fragments thereof, where the proteins comprise HLA-G1, Spi9, PD-L1, PD-L2, CD47, and galectin-9. In some cases, CD47, PD-L1, and PD-L2 encoded by the transgenes herein can be human CD47, human PD-L1 and human PD0-L2. In some cases, the genetically modified cell can be coated with CD47 on its surface. Coating of CD47 on the surface of a cell can be accomplished by biotinylating the cell surface followed by incubating the biotinylated cell with a streptavidin-CD47 chimeric protein. The coated CD47 can be human CD47.

[0173] As discussed above in the section regarding the genetically modified non-human animals, the genetically modified cell can comprise 1, 2, 3, 4, 5, 6, 7, 8, 9, 10, 11, 12, 13, 14, 15, 16, 17, 18, 19, 20 or more disrupted genes. A genetically modified cell can also comprise 1, 2, 3, 4, 5, 6, 7, 8, 9, 10, 11, 12, 13, 14, 15, 16, 17, 18, 19, 20, or more transgenes.

[0174] As discussed in detail above, a genetically modified cell, e.g., porcine cell, can also comprise dominant negative transgenes and/or transgenes expressing one or more knockdown genes. Also as discussed above, expression of a transgene can be controlled by one or more promoters.

[0175] A genetically modified cell can be one or more cells from tissues or organs, the tissues or organs including brain, lung, liver, heart, spleen, pancreas, small intestine, large intestine, skeletal muscle, smooth muscle, skin, bones, adipose tissues, hairs, thyroid, trachea, gall bladder, kidney, ureter, bladder, aorta, vein, esophagus, diaphragm, stomach, rectum, adrenal glands, bronchi, ears, eyes, retina, genitals, hypothalamus, larynx, nose, tongue, spinal cord, or ureters, uterus, ovary and testis. For example, a genetically modified cell, e.g., porcine cell, can be from brain, heart, liver, skin, intestine, lung, kidney, eye, small bowel, or pancreas. In some cases, a genetically modified cell can be from a pancreas. More specifically, pancreas cells can be islet cells. Further, one or more cells can be pancreatic α cells, pancreatic β cells, pancreatic δ cells, pancreatic F cells (e.g., PP cells), or pancreatic c cells. For example, a genetically modified cell can be pancreatic β cells. Tissues or organs disclosed herein can comprise one or more genetically modified cells. The tissues or organs can be from one or more genetically modified animals described in the application, e.g., pancreatic tissues such as pancreatic islets from one or more genetically modified pigs.

[0176] A genetically modified cell, e.g., porcine cell, can comprise one or more types of cells, where the one or more types of cells include Trichocytes, keratinocytes, gonadotropes, corticotropes, thyrotropes, somatotropes, lactotrophs, chromaffin cells, parafollicular cells, glomus cells melanocytes, nevus cells, merkel cells, odontoblasts, cementoblasts corneal keratocytes, retina muller cells, retinal pigment epithelium cells, neurons, glias (e.g., oligodendrocyte astrocytes), ependymocytes, pinealocytes, pneumocytes (e.g., type I pneumocytes, and type II pneumocytes), clara cells, goblet cells, G cells, D cells, ECL cells, gastric chief cells, parietal cells, foveolar cells, K cells, D cells, I cells, goblet cells, paneth cells, enterocytes, microfold cells, hepatocytes, hepatic stellate cells (e.g., Kupffer cells from mesoderm), cholecystocytes, centroacinar cells, pancreatic stellate cells, pancreatic α cells, pancreatic β cells, pancreatic δ cells, pancreatic F cells (e.g., PP cells), pancreatic c cells, thyroid (e.g., follicular cells), parathyroid (e.g., parathyroid chief cells), oxyphil cells, urothelial cells, osteoblasts, osteocytes, chondroblasts, chondrocytes, fibroblasts, fibrocytes, myoblasts, myocytes, myosatellite cells, tendon cells, cardiac muscle cells, lipoblasts, adipocytes, interstitial cells of cajal, angioblasts, endothelial cells, mesangial cells (e.g., intraglomerular mesangial cells and extraglomerular mesangial cells), juxtaglomerular cells, macula densa cells, stromal cells, interstitial cells, telocytes simple epithelial cells, podocytes, kidney proximal tubule brush border cells, sertoli cells, leydig cells, granulosa cells, peg cells, germ cells, spermatozoon ovums, lymphocytes, myeloid cells, endothelial progenitor cells, endothelial stem cells, angioblasts, mesoangioblasts, and pericyte mural cells. A genetically modified cell can potentially be any cells used in cell therapy. For example, cell therapy can be pancreatic β cells supplement or replacement to a disease such as diabetes.

[0177] A genetically modified cell, e.g., porcine cell, can be from (e.g., extracted from) a non-human animal. One or more cells can be from a mature adult non-human animal. However, one or more cells can be from a fetal or neonatal tissue.

[0178] Depending on the disease, one or more cells can be from a transgenic non-human animal that has grown to a sufficient size to be useful as an adult donor, e.g., an islet cell donor. In some cases, non-human animals can be past weaning age. For example, non-human animals can be at least or at least about six months old. In some cases, non-human animals can be at least or at least about 18 months old. A non-human animal in some cases, survive to reach breeding age. For example, islets for xenotransplantation can be from neonatal (e.g., age 3-7 days) or pre-weaning (e.g., age 14 to 21 days) donor pigs. One or more genetically modified cells, e.g., porcine cells, can be cultured cells. For example, cultured cells can be from wild-type cells or from genetically modified cells (as described herein). Furthermore, cultured cells can be primary cells. Primary cells can be extracted and frozen, e.g., in liquid nitrogen or at −20° C. to −80° C. Cultured cells can also be immortalized by known methods, and can be frozen and stored, e.g., in liquid nitrogen or at −20° C. to −80° C.

[0179] Genetically modified cells, e.g., porcine cells, as described herein can have a lower risk of rejection, when compared to when a wild-type non-genetically modified cell is transplanted.

[0180] Disclosed herein is a vector comprising a polynucleotide sequence of ICP47, CD46, CD55, CD59, HLA-E, HLA-G (e.g., HLA-G1, HLA-G2, HLA-G3, HLA-G4, HLA-G5, HLA-G6, or HLA-G7), B2M, Spi9, PD-L1, PD-L2, CD47, galectin-9, any functional fragments thereof, or any combination thereof. These vectors can be inserted into a genome of a cell (by transfection, transformation, viral delivery, or any other known method). These vectors can encode ICP47, CD46, CD55, CD59, HLA-E, HLA-G (e.g., HLA-G1, HLA-G2, HLA-G3, HLA-G4, HLA-G5, HLA-G6, or HLA-G7), B2M Spi9, PD-L1, PD-L2, CD47, and/or galectin-9 proteins or functional fragments thereof.

[0181] Vectors contemplated include, but not limited to, plasmid vectors, artificial/mini-chromosomes, transposons, and viral vectors. Further disclosed herein is an isolated or synthetic nucleic acid comprising an RNA, where the RNA is encoded by any sequence in Table 2. RNA can also encode for any sequence that exhibits at least or at least about 50%, 60%, 70%, 80%, 90%, 95%, 99%, or 100% homology to any sequence in Table 2. RNA can also encode for any sequence that exhibits at least or at least about 50%, 60%, 70%, 80%, 90%, 95%, 99%, or 100% identity to any sequence in Table 2.

[0182] RNA can be a single-chain guide RNA. The disclosure also provides an isolated or synthesized nucleic acid comprising any sequence in Table 1. RNA can also provide an isolated or synthesized nucleic acid that exhibits at least or at least about 50%, 60%, 70%, 80%, 90%, 95%, 99%, or 100% homology to any sequence in Table 1. RNA can also provide an isolated or synthesized nucleic acid that exhibits at least or at least about 50%, 60%, 70%, 80%, 90%, 95%, 99%, or 100% identity to any sequence in Table 1.

[0183] Guide RNA sequences can be used in targeting one or more genes in a genome of a non-human animal. For example, guide RNA sequence can target a single gene in a genome of non-human animal. In some cases, guide RNA sequences can target one or more target sites of each of one or more genes in a genome of a non-human animal.

[0184] Genetically modified cells can also be leukocytes, lymphocytes, B lymphocytes, or any other cell such as islet cells, islet beta cells, or hepatocytes. These cells can be fixed or made apopototic by any method disclosed herein, e.g., by ECDI fixation.

[0185] A genetically modified cells can be derived (e.g., retrieved) from a non-human fetal animal, perinatal non-human animal, neonatal non-human animal, preweaning non-human animal, young adult non-human animal, adult non-human animal, or any combination thereof. In some cases, a genetically modified non-human animal cell can be derived from an embryonic tissue, e.g., an embryonic pancreatic tissue. For example, a genetically modified cell can be derived (e.g., retrieved) from an embryonic pig pancreatic tissue from embryonic day 42 (E42).

[0186] The term “fetal animal” and its grammatical equivalents can refer to any unborn offspring of an animal. The term “perinatal animal” and its grammatical equivalents can refer to an animal immediately before or after birth. For example, a perinatal period can start from 20th to 28th week of gestation and ends 1 to 4 weeks after birth. The term “neonatal animal” and its grammatical equivalents can refer to any new born animals. For example, a neonatal animal can be an animal born within a month. The term “preweaning non-human animal” and its grammatical equivalents can refer to any animal before being withdrawn from the mother's milk.

[0187] Genetically modified non-human animal cells can be formulated into a pharmaceutical composition. For example, the genetically modified non-human animal cells can be combined with a pharmaceutically acceptable excipient. An excipient that can be used is saline. The pharmaceutical composition can be used to treat patients in need of transplantation.

[0188] A genetically modified cell can comprise reduced expression of any genes, and/or any transgenes disclosed herein. Genetic modification of the cells can be done by using any of the same method as described herein for making the genetically modified animals. In some cases, a method of making a genetically modified cell originated from a non-human animal can comprise reducing expression of one or more genes and/or inserting one or more transgenes. The reduction of gene expression and/or transgene insertion can be performed using any methods described in the application, e.g., gene editing.

Genetically Modified Cells Derived from Stem Cells

[0189] Genetically modified cells can be a stem cell. These genetically modified stem cells can be used to make a potentially unlimited supply of cells that can be subsequently processed into fixed or apoptotic cells by the methods disclosed herein. As discussed above, stem cells are not capable of generating a viable human being.

[0190] The production of hundreds of millions of insulin-producing, glucose-responsive pancreatic beta cells from human pluripotent stem cells provides an unprecedented cell source for cell transplantation therapy in diabetes (Pagliuca et al., 2014). Other human stem cell-(embryonic, pluripotent, placental, induced pluripotent, etc.) derived cell sources for cell transplantation therapy in diabetes and in other diseases are being developed.

[0191] These stem cell-derived cellular grafts are subject to rejection. The rejection can be mediated by CD8+ T cells. In Type 1 diabetic recipients, human stem cell-derived functional beta cells are subject to rejection and autoimmune recurrence. Both are thought to be mediated by CD8+ T cells.

[0192] To interfere with activation and effector function of these allo-reactive and auto-reactive CD8+ T cells, established molecular methods of gene modification, including CRISP/Cas9 gene targeting, can be used to mutate the NLRC5, TAP1, and/or B2M genes in human stem cells for the purpose of preventing cell surface expression of functional MHC class I in the stem cell-derived, partially or fully differentiated cellular graft. Thus, transplanting human stem cell-derived cellular grafts lacking functional expression of MHC class I can minimize the requirements of immunosuppression otherwise required to prevent rejection and autoimmune recurrence.

[0193] However, lack of MHC class I expression on transplanted human cells will likely cause the passive activation of natural killer (NK) cells (Ohlen et al, 1989). NK cell cytotoxicity can be overcome by the expression of the human MHC class 1 gene, HLA-E, which stimulates the inhibitory receptor CD94/NKG2A on NK cells to prevent cell killing (Weiss et al., 2009; Lilienfeld et al., 2007; Sasaki et al., 1999). Successful expression of the HLA-E gene was dependent on co-expression of the human B2M (beta 2 microglobulin) gene and a cognate peptide (Weiss et al., 2009; Lilienfeld et al., 2007; Sasaki et al., 1999; Pascasova et al., 1999). A nuclease mediated break in the stem cell DNA allows for the insertion of one or multiple genes via homology directed repair. The HLA-E and hB2M genes in series can be integrated in the region of the nuclease mediated DNA break thus preventing expression of the target gene (for example, NLRC5) while inserting the transgenes.

[0194] To further minimize, if not eliminate, the need for maintenance immunosuppression in recipients of stem cell derived cellular grafts lacking functional expression of MHC class I, recipients of these grafts can also be treated with tolerizing apoptotic donor cells disclosed herein.

[0195] The methods for the production of insulin-producing pancreatic beta cells (Pagliuca et al., 2014) can potentially be applied to non-human (e.g., pig) primary isolated pluripotent, embryonic stem cells or stem-like cells (Goncalves et al., 2014; Hall et al. V. 2008). However, the recipient of these insulin-producing pancreatic beta cells likely has an active immune response that threatens the success of the graft. To overcome antibody-mediated and CD8+ T cell immune attack, the donor animal can be genetically modified before isolation of primary non-human pluripotent, embryonic stem cells or stem-like cells to prevent the expression of the GGTA1, CMAH, B4GalNT2, or MHC class I-related genes as disclosed throughout the application. The pluripotent, embryonic stem cells or stem-like cells isolated from genetically modified animals could then be differentiated into millions of insulin-producing pancreatic beta cells.

[0196] Xenogeneic stem cell-derived cell transplants can be desirable in some cases. For example, the use of human embryonic stem cells may be ethically objectionable to the recipient. Therefore, human recipients may feel more comfortable receiving a cellular graft derived from non-human sources of embryonic stem cells.

[0197] Non-human stem cells may include pig stem cells. These stem cells can be derived from wild-type pigs or from genetically engineered pigs. If derived from wild-type pigs, genetic engineering using established molecular methods of gene modification, including CRISP/Cas9 gene targeting, may best be performed at the stem cell stage. Genetic engineering may be targeted to disrupt expression of NLRC5, TAP1, and/or B2M genes to prevent functional expression of MHC class I. Disrupting genes such as NLRC5, TAP1, and B2M in the grafts can cause lack of functional expression of MHC class I on graft cells including on islet beta cells, thereby interfering with the post-transplant activation of autoreactive CD8+ T cells. Thus, this can protect the transplant, e.g., transplanted islet beta cells, from the cytolytic effector functions of autoreactive CD8+ T cells.

[0198] However, as genetic engineering of stem cells may alter their potential for differentiation, an approach can be to generate stem cell lines from genetically engineered pigs, including those pigs, in whom the expression of NLRC5, TAP1, and/or B2M genes has been disrupted.

[0199] Generation of stem cells from pigs genetically modified to prevent the expression also of the GGTA1, CMAH, B4GalNT2 genes or modified to express transgenes that encode for complement regulatory proteins CD46, CD55, or CD59, as disclosed throughout the application, could further improve the therapeutic use of the insulin-producing pancreatic beta cells or other cellular therapy products. Likewise, the same strategy as described herein can be used in other methods and compositions described throughout.

[0200] Like in recipients of human stem cell-derived cellular grafts lacking functional expression of MHC class I, the need for maintenance immunosuppression in recipients of pig stem cell-derived grafts can be further minimized by peritransplant treatments with tolerizing apoptotic donor cells.

### III. Tolerizing Vaccines

[0201] Traditionally, vaccines are used to confer immunity to a host. For example, injecting an inactivated virus with adjuvant under the skin can lead to temporary or permanent immunity to the active and/or virulent version of the virus. This can be referred to as a positive vaccine (FIG. 3). However, inactivated cells (e.g., cells from a donor or an animal genetically different from the donor) that is injected intravenously, can result in tolerance of a donor cells, or cells with similar cellular markers. This can be referred to as a tolerizing vaccine (also referred to as a negative vaccine) (FIG. 3). The inactive cells can be injected without an adjuvant. Alternatively, the inactive cells can be injected with an adjuvant. These tolerizing vaccines can be advantageous in transplantation, for example, in xenotransplantation, by tolerizing a recipient and preventing rejection. Tolerization can be conferred to a recipient without the use of immunosuppressive therapies. However, in some cases, other immunosuppressive therapies in combination with tolerizing vaccines, can decrease transplantation rejection.

[0202] FIG. 4 demonstrates an exemplary approach to extending the survival of transplanted grafts (e.g., xenografts) in a subject (e.g., a human or a non-human primate) with infusion (e.g., intravenous infusion) of apoptotic cells from the donor for tolerizing vaccination under the cover of transient immunosuppression. A donor can provide xenografts for transplantation (e.g., islets), as well as cells (e.g., splenocytes) as a tolerizing vaccine. The tolerizing vaccine cells can be apoptotic cells (e.g., by ECDI fixation) and administered to the recipient before (e.g., the first vaccine, on day 7 before the transplantation) and after the transplantation (e.g., the booster vaccine, on day 1 after the transplantation). The tolerizing vaccine can provide transient immunosuppression that extends the time of survival of the transplanted grafts (e.g., islets).

[0203] Tolerizing vaccines can comprise one or more of the following types of cells: i) apoptotic cells comprising genotypically identical cells with reduced expression of GGTA1 alone, or GGTA1 and CMAH, or GGTA1, CMAH, and B4GALNT2. This can minimize or eliminate cell-mediated immunity and cell-dependent antibody-mediated immunity to organ, tissue, cell, and cell line grafts (e.g., xenografts) from animals that are genotypically identical with the apoptotic cell vaccine donor animal, or from animals that have undergone additional genetic modifications (e.g., suppression of NLRC5, TAP1, MICA, MICB, CXCL10, C3, CIITA genes or expression of transgenes comprising two or more polynucleotide inserts of ICP47, CD46, CD55, HLA-E, HLA-G (e.g., HLA-G1, HLA-G2, HLA-G3, HLA-G4, HLA-G5, HLA-G6, or HLA-G7), B2M, CD59, or any functional fragments thereof), but are genotypically similar to the donor animal from which the apoptotic cell vaccine is derived; ii) apoptotic stem cell (e.g., embryonic, pluripotent, placental, induced pluripotent, etc.)-derived donor cells (e.g., leukocytes, lymphocytes, T lymphocytes, B lymphocytes, red blood cells, graft cells, or any other donor cell) for minimizing or eliminating cell-mediated immunity and cell-dependent antibody-mediated immunity to organ, tissue, cell, and cell line grafts (e.g., xenografts) from animals that are genotypically identical with the apoptotic cell vaccine donor animal or from animals that have undergone additional genetic modifications (e.g., suppression of NLRC5, TAP1, MICA, MICB, CXCL10, C3, CIITA genes or expression of transgenes comprising two or more polynucleotide inserts of ICP47, CD46, CD55, HLA-E, HLA-G (e.g., HLA-G1, HLA-G2, HLA-G3, HLA-G4, HLA-G5, HLA-G6, or HLA-G7), B2M, CD59, or any functional fragments thereof), but are genotypically similar to the donor animal from which the apoptotic stem cell-derived cell vaccine is derived; iii) apoptotic stem cell (e.g., embryonic, pluripotent, placental, induced pluripotent, etc.)-derived donor cells (leukocytes, lymphocytes, T lymphocytes, B lymphocytes, red blood cells, graft cells such as functional islet beta cells, or any other donor cell) for minimizing or eliminating cell-mediated immunity and cell-dependent antibody-mediated immunity to organ, tissue, cell, and cell grafts (e.g., allografts) that are genotypically identical with the human stem cell line or to grafts (e.g., allografts) derived from the same stem cell line that have undergone genetic modifications (e.g., suppression of NLRC5, TAP1, MICA, MICB, CXCL10, C3, CIITA genes) but are otherwise genotypically similar to the apoptotic human stem cell-derived donor cell vaccine; iv) apoptotic donor cells, where the cells are made apoptotic by UV irradiation, gamma-irradiation, or other methods not involving incubation in the presence of ECDI. In some cases, tolerizing vaccine cells can be adminstered, e.g., infused (in some cases repeatedly infused) to a subject in need thereof. Tolerizing vaccines can be produced by disrupting (e.g., reducing expression) one or more genes from a cell. For example, genetically modified cells as described throughout the application can be used to make a tolerizing vaccine. For example, cells can have one or more genes that can be disrupted (e.g., reduced expression) including glycoprotein galactosyltransferase alpha 1,3 (GGTA1), putative cytidine monophosphate-N-acetylneuraminic acid hydroxylase-like protein (CMAH), B4GALNT2, and/or any combination thereof. For example, a cell can have disrupted GGTA1 only, or disrupted CMAH only, or disrupted B4GALNT2 only. A cell can also have disrupted GGTA1 and CMAH, disrupted GGTA1 and B4GALNT2, or disrupted CMAH and B4GALNT2. A cell can have disrupted GGTA1, CMAH, and B4GALNT2. In some cases, the disrupted gene does not include GGTA1. A cell can also express NLRC5 (endogenously or exogenously), while GGTA1 and/or CMAH are disrupted. A cell can also have disrupted C3.

[0204] A tolerizing vaccine can be produced with cells comprising additionally expressing one or more transgenes, e.g., as described throughout the application. For example, a tolerizing vaccine can comprise a cell comprising one or more transgenes comprising one or more polynucleotide inserts of Infected cell protein 47 (ICP47), Cluster of differentiation 46 (CD46), Cluster of differentiation 55 (CD55), Cluster of differentiation 59 (CD 59), HLA-E, HLA-G (e.g., HLA-G1, HLA-G2, HLA-G3, HLA-G4, HLA-G5, HLA-G6, or HLA-G7), B2M, PD-L1, PD-L2, CD47, any functional fragments thereof, or any combination thereof. In some cases, a tolerizing vaccine can comprise a genetically modified cell comprising reduced protein expression of GGTA1, CMAH, and B4GALNT2, and transgenes comprising polynucleotides encoding proteins or functional fragments thereof, where the proteins comprise HLA-G1, PD-L1, PD-L2, and CD47. In some cases, a tolerizing vaccine can comprise a genetically modified cell comprising reduced protein expression of GGTA1, CMAH, and B4GALNT2, and transgenes comprising polynucleotides encoding proteins or functional fragments thereof, where the proteins comprise HLA-E, PD-L1, PD-L2, and CD47. In some cases, a tolerizing vaccine can comprise a cell coated with CD47 on its surface. Coating of CD47 on the surface of a cell can be accomplished by biotinylating the cell surface followed by incubating these biotinylated cells with a streptavidin-CD47 chimeric protein. For example, a tolerizing vaccine can comprise a cell coated with CD47 on its surface, where the cell comprises reduced protein expression of GGTA1, CMAH, and B4GALNT2, and transgenes comprising polynucleotides encoding proteins or functional fragments thereof, where the proteins comprise HLA-G1, PD-L1, and PD-L2. A CD47-coated cell can be a non-apoptotic cell. Alternative, a CD47 coated cell can be an apoptotic cell.

[0205] When administered in a subject, a cell of a tolerizing vaccine can have a circulation half-life. A cell of a tolerizing vaccine can have a circulation half-life of at least or at least about 0.1, 0.5, 1, 2, 3, 4, 5, 6, 7, 8, 9, 10, 12, 18, 24, 36, 48, 60, or 72 hours. For example, the circulation half-life of the tolerizing vaccine can be from or from about 0.1 to 0.5; 0.5 to 1.0; 1.0 to 2.0; 1.0 to 3.0; 1.0 to 4.0; 1.0 to 5.0; 5 to 10; 10 to 15; 15 to 24; 24 to 36; 36 to 48; 48 to 60; or 60 to 72 hours. A cell in a tolerizing vaccine can be treated to enhance its circulation half-life. Such treatment can include coating the cell with a protein, e.g., CD47. A cell treated to enhance its circulation half-life can be a non-apoptotic cell. A cell treated to enhance its circulation half-life can be an apoptotic cell. Alternatively, a cell in a tolerizing vaccine can be genetically modified (e.g., insertion of a transgene such as CD47 in its genome) to enhance its circulation half-life. A cell genetically modified to enhance its circulation half-life can be a non-apoptotic cell. A cell genetically modified to enhance its circulation half-life can be an apoptotic cell.

[0206] A tolerizing vaccine can have both one or more disrupted genes (e.g., reduced expression) and one or more transgenes. Any genes and/or transgenes as described herein can be used.

[0207] A cell that comprises one or more disrupted genes (e.g., reduced expression) can be used as, or be a part of, a tolerizing vaccine. In other words, a cell that comprises one or more disrupted genes can be or can be made into a tolerizing vaccine.

[0208] A tolerizing vaccine can have the same genotype and/or phenotype as cells, organs, and/or tissues used in transplantation. Sometimes, the genotype and/or phenotype of a tolerizing vaccine and a transplant are different. A tolerizing vaccine used for a transplant recipient can comprise cells from the transplant graft donor. A tolerizing vaccine used for a transplant recipient can comprise cells that are genetically and/or phenotypically different from the transplant graft. In some cases, a tolerizing vaccine used for a transplant recipient can comprise cells from the transplant graft donor and cells that are genetically and/or phenotypically different from the transplant graft. The cells that are genetically and/or phenotypically different from the transplant graft can be from an animal of the same species of the transplant graft donor.

[0209] A source of cells for a tolerizing vaccine can be from a human or non-human animal.

[0210] Cells as disclosed throughout the application can be made into a tolerizing vaccine. For example, a tolerizing vaccine can be made of one or more transplanted cells disclosed herein. Alternatively, a tolerizing vaccine can be made of one or more cells that are different from any of the transplanted cells. For example, the cells made into a tolerizing vaccine can be genotypically and/or phenotypically different from any of the transplanted cells. However in some cases, the tolerizing vaccine will express NLRC5 (endogenously or exogenously). A tolerizing vaccine can promote survival of cells, organs, and/or tissues in transplantation. A tolerizing vaccine can be derived from non-human animals that are genotypically identical or similar to donor cells, organs, and/or tissues. For example, a tolerizing vaccine can be cells derived from pigs (e.g., apoptotic pig cells) that are genotypically identical or similar to donor pig cells, organs, and/or tissues. Subsequently, donor cells, organs, and/or tissues can be used in allografts or xenografts. In some cases, cells for a tolerizing vaccine can be from genetically modified animals (e.g., pigs) with reduced expression of GGTA1, CMAH, and B4GalNT2, and having transgenes encoding HLA-G (or HLA-E-), human CD47, human PD-L1 and human PD-L2. Graft donor animals can be generated by further genetically modifying the animals (e.g., pigs) for tolerizing vaccine cells. For example, graft donor animals can be generated by disrupting additional genes (e.g., NLRC5 (or TAP1), C3, and CXCL10) in the abovementioned animals for tolerizing vaccines cells (FIG. 5).

[0211] A tolerizing vaccine can comprise non-human animal cells (e.g., non-human mammalian cells). For example, non-human animal cells can be from a pig, a cat, a cattle, a deer, a dog, a ferret, a gaur, a goat, a horse, a mouse, a mouflon, a mule, a rabbit, a rat, a sheep, or a primate. Specifically, non-human animal cells can be porcine cells. A tolerizing vaccine can also comprise genetically modified non-human animal cells. For example, genetically modified non-human animal cells can be dead cells (e.g., apoptotic cells). A tolerizing vaccine can also comprise any genetically modified cells disclosed herein.

### Treatment of Cells to Make a Tolerizing Vaccine

[0212] A tolerizing vaccine can comprise cells treated with a chemical. In some cases, the treatment can induce apoptosis of the cells. Without being bound by theory, the apoptotic cells can be picked up by host antigen presenting cells (e.g., in the spleen) and presented to host immune cells (e.g., T cells) in a non-immunogenic fashion that leads to induction of anergy in the immune cells (e.g., T cells).

[0213] Tolerizing vaccines can comprise apoptotic cells and non-apoptotic cells. An apoptotic cell in a tolerizing vaccine can be genetically identical to a non-apoptotic cell in the tolerizing vaccine. Alternatively, an apoptotic cell in a tolerizing vaccine can be genetically different from a non-apoptotic cell in the tolerizing vaccine. Tolerizing vaccines can comprise fixed cells and non-fixed cells. A fixed cell in a tolerizing vaccine can be genetically identical to a non-fixed cell in the tolerizing vaccine. Alternatively, a fixed cell in a tolerizing vaccine can be genetically different from a non-fixed cell in the tolerizing vaccine. In some cases, the fixed cell can be a 1-ethyl-3-(3-dimethylaminopropyl)-carbodiimide (ECDI)-fixed cell.

[0214] Cells in a tolerizing vaccine can be fixed using a chemical, e.g., ECDI. The fixation can make the cells apoptotic. A tolerizing vaccine, cells, kits and methods disclosed herein can comprise ECDI and/or ECDI treatment. For example, a tolerizing vaccine can be cells, e.g., the genetically modified cell as disclosed herein, that are treated with 1-ethyl-3-(3-dimethylaminopropyl)-carbodiimide (ECDI). In other words, the genetically modified cells as described throughout can be treated with ECDI to create a tolerizing vaccine. A tolerizing vaccine can then be used in transplantation to promote survival of cells, organs, and/or tissues that are transplanted. It is also contemplated that ECDI derivatives, functionalized ECDI, and/or substituted ECDI can also be used to treat the cells for a tolerizing vaccine. In some cases, cells for a tolerizing vaccine can be treated with any suitable carbodiimide derivatives, e.g., ECDI, N,N′-diisopropylcarbodiimide (DIC), N,N′-dicyclohexylcarbodiimide (DCC), and other carbodiimide derivatives understood by those in the art.

[0215] Cells for tolerizing vaccines can also be made apoptotic methods not involving incubation in the presence of ECDI, e.g., other chemicals or irradiation such as UV irradiation or gamma-irradiation.

[0216] ECDI can chemically cross-link free amine and carboxyl groups, and can effectively induce apoptosis in cells, organs, and/or tissues, e.g., from animal that gave rise to both a tolerizing vaccine and a donor non-human animal. In other words, the same genetically modified animal can give rise to a tolerizing vaccine and cells, tissues and/or organs that are used in transplantation. For example, the genetically modified cells as disclosed herein can be treated with ECDI. This ECDI fixation can lead to the creation of a tolerizing vaccine.

[0217] Genetically modified cells that can be used to make a tolerizing vaccine can be derived from: a spleen (including splenic B cells), liver, peripheral blood (including peripheral blood B cells), lymph nodes, thymus, bone marrow, or any combination thereof. For example, cells can be spleen cells, e.g., porcine spleen cells. In some cases, cells can be expanded ex-vivo. In some cases, cells can be derived from fetal, perinatal, neonatal, preweaning, and/or young adult, non-human animals. In some cases, cells can be derived from an embryo of a non-human animal.

[0218] Cells in a tolerizing vaccine can also comprise two or more disrupted (e.g., reduced expression) genes, where the two or more disrupted genes can be glycoprotein galactosyltransferase alpha 1,3 (GGTA1), putative cytidine monophosphate-N-acetylneuraminic acid hydroxylase-like protein (CMAH), HLA-E, HLA-G (e.g., HLA-G1, HLA-G2, HLA-G3, HLA-G4, HLA-G5, HLA-G6, or HLA-G7), B2M, and B4GALNT2, any functional fragments thereof, or any combination thereof. In some cases, the two or more disrupted genes does not include GGTA1. As described above, disruption can be a knockout or suppression of gene expression. Knockout can be performed by gene editing, for example, by using a CRISPR/cas system. Alternatively, suppression of gene expression can be done by knockdown, for example, using RNA interference, shRNA, one or more dominant negative transgenes. In some cases, cells can further comprise one or more transgenes as disclosed herein. For example, one or more transgenes can be CD46, CD55, CD59, or any combination thereof.

[0219] Cells in a tolerizing vaccine can also be derived from one or more donor non-human animals. In some cases, cells can be derived from the same donor non-human animal. Cells can be derived from one or more recipient non-human animals. In some cases, cells can be derived from two or more non-human animals (e.g., pig).

[0220] A tolerizing vaccine can comprise from or from about 0.001 and about 5.0, e.g., from or from about 0.001 and 1.0, endotoxin unit per kg bodyweight of a prospective recipient. For example, a tolerizing vaccine can comprise from or from about 0.01 to 5.0; 0.01 to 4.5; 0.01 to 4.0, 0.01 to 3.5; 0.01 to 3.0; 0.01 to 2.5; 0.01 to 2.0; 0.01 to 1.5; 0.01 to 1.0; 0.01 to 0.9; 0.01 to 0.8; 0.01 to 0.7; 0.01 to 0.6; 0.01 to 0.5; 0.01 to 0.4; 0.01 to 0.3; 0.01 to 0.2; or 0.01 to 0.1 endotoxin unit per kg bodyweight of a prospective recipient.

[0221] A tolerizing vaccine can comprise from or from about 1 to 100 aggregates, per μl. For example, a tolerizing vaccine can comprise from or from about 1 to 5; 1 to 10, or 1 to 20 aggregate per μl. A tolerizing vaccine can comprise at least or at least about 1, 5, 10, 20, 50, or 100 aggregates.

[0222] A tolerizing vaccine can trigger a release from or from about 0.001 pg/ml to 10.0 pg/ml, e.g., from or from about 0.001 pg/ml to 1.0 pg/ml, IL-1 beta when about 50,000 frozen to thawed human peripheral blood mononuclear cells are incubated with about 160,000 cells of the tolerizing vaccine (e.g., pig cells). For example, a tolerizing vaccine triggers a release of from or from about 0.001 to 10.0; 0.001 to 5.0; 0.001 to 1.0; 0.001 to 0.8; 0.001 to 0.2; or 0.001 to 0.1 pg/ml IL-1 beta when about 50,000 frozen to thawed human peripheral blood mononuclear cells are incubated with about 160,000 cell of the tolerizing vaccine (e.g., pig cells). A tolerizing vaccine can trigger a release of from or from about 0.001 to 2.0 pg/ml, e.g., from or from about 0.001 to 0.2 pg/ml, IL-6 when about 50,000 frozen to thawed human peripheral blood mononuclear cells are incubated with about 160,000 cells of the tolerizing vaccine (e.g., pig cells). For example, a tolerizing vaccine can trigger a release of from or from about 0.001 to 2.0; 0.001 to 1.0; 0.001 to 0.5; or 0.001 to 0.1 pg/ml IL-6 when about 50,000 frozen to thawed human peripheral blood mononuclear cells are incubated with about 160,000 cells of the tolerizing vaccine (e.g., pig cells).

[0223] A tolerizing vaccine can comprise more than or more than about 60%, e.g., more than or more than about 85%, Annexin V positive, apoptotic cells after a 4 hour or after about 4 hours post-release incubation at 37° C. For example, a tolerizing vaccine comprises more than 60%, 70%, 80%, 90%, or 99% Annexin V positive, apoptotic cells after about a 4 hour post-release incubation at 37° C.

[0224] A tolerizing vaccine can include from or from about 0.01% to 10%, e.g., from or from about 0.01% to 2%, necrotic cells. For example, a tolerizing vaccine includes from or from about 0.01% to 10%; 0.01% to 7.5%, 0.01% to 5%; 0.01% to 2.5%; or 0.01% to 1% necrotic cells.

[0225] Administering a tolerizing vaccine comprising ECDI-treated cells, organs, and/or tissues before, during, and/or after administration of donor cells can induce tolerance for cells, organs, and/or tissues in a recipient (e.g., a human or a non-human animal). ECDI-treated cells can be administered by intravenous infusion.

[0226] Tolerance induced by infusion of a tolerizing vaccine comprising ECDI-treated splenocytes is likely dependent on synergistic effects between an intact programmed death 1 receptor-programmed death ligand 1 signaling pathway and CD4⁺CD25⁺Foxp3⁺ regulatory T cells.

[0227] Cells in a telorizing vaccine can be made into apoptotic cells (e.g., tolerizing vaccines) not only by ECDI fixation, but also through other methods. For example, any of the genetically modified cells as disclosed throughout, e.g., non-human cells animal cells or human cells (including stem cells), can be made apopototic by exposing the genetically modified cells to UV irradiation. The genetically modified cells can also be made apopototic by exposing it to gamma-irradiation. Other methods, not involving ECDI are also comtemplated, for example, by EtOH fixation.

[0228] Cells in a tolerizing vaccine, e.g., ECDI-treated cells, antigen-coupled cells, and/or epitope-coupled cells can comprise donor cells (e.g., cells from the donor of transplant grafts). Cells in a tolerizing vaccine, e.g., ECDI-treated cells, antigen-coupled cells, and/or epitope-coupled cells can comprise recipient cells (e.g., cells from the recipient of transplant grafts). Cells in a tolerizing vaccine, e.g., ECDI-treated cells, antigen-coupled cells, and/or epitope-coupled cells can comprise third party (e.g., neither donor nor recipient) cells. In some cases, third party cells are from a non-human animal of the same species as a recipient and/or donor. In other cases, third party cells are from a non-human animal of a different species as a recipient and/or donor.

[0229] ECDI-treatment of cells can be performed in the presence of one or more antigens and/or epitopes. ECDI-treated cells can comprise donor, recipient and/or third party cells. Likewise, antigens and/or epitopes can comprise donor, recipient and/or third party antigens and/or epitopes. In some cases, donor cells are coupled to recipient antigens and/or epitopes (e.g., ECDI-induced coupling). For example, soluble donor antigen derived from genetically engineered and genotypically identical donor cells (e.g., porcine cells) is coupled to recipient peripheral blood mononuclear cells with ECDI and the ECDI-coupled cells are administered via intravenous infusion.

[0230] In some cases, recipient cells are coupled to donor antigens and/or epitopes (e.g., ECDI-induced coupling). In some cases, recipient cells are coupled to third party antigens and/or epitopes (e.g., ECDI-induced coupling). In some cases, donor cells are coupled to recipient antigens and/or epitopes (e.g., ECDI-induced coupling). In some cases, donor cells are coupled to third party antigens and/or epitopes (e.g., ECDI-induced coupling). In some cases, third party cells are coupled to donor antigens and/or epitopes (e.g., ECDI-induced coupling). In some cases, third party cells are coupled to recipient antigens and/or epitopes (e.g., ECDI-induced coupling). For example, soluble donor antigen derived from genetically engineered and genotypically identical donor cells (e.g., porcine cells) is coupled to polystyrene nanoparticles with ECDI and the ECDI-coupled cells are administered via intravenous infusion.

[0231] Tolerogenic potency of any of these tolerizing cell vaccines can be further optimized by coupling to the surface of cells one or more of the following: IFN-g, NF-kB inhibitors (such as curcumin, triptolide, Bay-117085), vitamin D3, siCD40, cobalt protoporphyrin, insulin B9-23, or other immunomodulatory molecules that modify the function of host antigen-presenting cells and host lymphocytes.

[0232] These apoptotic cell vaccines can also be complemented by donor cells engineered to display on their surface molecules (such as FasL, PD-L1, galectin-9, CD8alpha) that trigger apoptotic death of donor-reactive cells.

[0233] Tolerizing vaccines disclosed herein can increase the duration of survival of a transplant (e.g., a xenograft or an allograft transplant) in a recipient. Tolerizing vaccines disclosed herein can also reduce or eliminate need for immunosupression following transplantation. Xenograft or allograft transplant can be an organ, tissue, cell or cell line. Xenograft transplants and tolerizing vaccines can also be from different species. Alternatively, xenograft transplants and the tolerizing vaccines can be from the same species. For example, a xenograft transplant and a tolerizing vaccine can be from substantially genetically identical individuals (e.g., the same individual).

[0234] The ECDI fixed cells can be formulated into a pharmaceutical composition. For example, the ECDI fixed cells can be combined with a pharmaceutically acceptable excipient. An excipient that can be used is saline. An excipient that can be used is phosphate buffered saline (PBS). The pharmaceutical compositions can be then used to treat patients in need of transplantation.

Tolerizing Vaccines Made from Cells Derived Stem Cells

[0235] Cells for making tolerizing vaccines can be derived from stem cells. Such cells can include tolerizing apoptotic donor cells that are either stem cell-derived functional insulin-secreting islet β cells or other cells differentiated from the identical or genotypically similar stem cell line. These other cells can include leukocytes, lymphocytes, T lymphocytes, B lymphocytes, red blood cells, or any other donor cell.

[0236] These stem-cell derived tolerizing apoptotic donor cells need not be genetically engineered to lack functional expression of MHC class I. Functional expression of MHC class I on apoptotic donor cells can enhance their tolerogenic potential.

[0237] Stem cell-derived cells can be made apoptotic by UV irradiation, gamma-irradiation, or other methods not involving incubation in the presence of ECDI.

[0238] These negative cell vaccines can be infused intravenously pretransplant or both pretransplant and at intervals posttransplant, each under the cover of transient immunosuppression including but not limited to antagonistic anti-CD40 antibodies (e.g., humanized 2C10), B cell depleting or targeting antibodies (e.g., rituximab), mTOR inhibitors (e.g., rapamycin), and TNF-alpha inhibitors (e.g., sTNFR, including etanercept), and IL-6 inhibitors (e.g., anti-IL-6R antibody, including tocilizumab).

[0239] Tolerogenic potency of any of these tolerizing cell vaccines can be further optimized by coupling to the surface of cells one or more of the following molecules: IFN-g, NF-kB inhibitors (such as curcumin, triptolide, Bay-117085), vitamin D3, siCD40, cobalt protoporphyrin, insulin B9-23, or other immunomodulatory molecules that modify the function of host antigen-presenting cells and host lymphocytes.

[0240] These apoptotic cell vaccines can also be complemented by donor cells engineered to display on their surface molecules (such as FasL, PD-L1, galectin-9, CD8alpha) that trigger apoptotic death of donor-reactive cells.

[0241] As with human stem cell derived tolerizing vaccines, tolerizing apoptotic donor pig vaccines can be derived from the same cell sources, can express MHC class I antigen, made apoptotic using the same methods, optimized by by coupling to the surface of cells one or more immunomodulatory molecules, and infused intravenously pretransplant or both pretransplant and at intervals posttransplant under the cover of concomitant immunotherapy.

### IV. Method of Making Genetically Modified Non-Human Animals

[0242] In order to make a genetically modified non-human animal as described above, various techniques can be used. Disclosed herein are a few examples to create genetically modified animals. It is to be understood that the methods disclosed herein are simply examples, and are not meant to limiting in any way.

### Gene Disruption

[0243] Gene disruption can be performed by any methods described above, for example, by knockout, knockdown, RNA interference, dominant negative, etc. A detailed description of the methods are disclosed above in the section regarding genetically modified non-human animals.

[0244] CRISPR/Cas System

[0245] Methods described herein can take advantage of a CRISPR/cas system. For example, double-strand breaks (DSBs) can be generated using a CRISPR/cas system, e.g., a type II CRISPR/cas system. A Cas enzyme used in the methods disclosed herein can be Cas9, which catalyzes DNA cleavage. Enzymatic action by Cas9 derived from Streptococcus pyogenes or any closely related Cas9 can generate double stranded breaks at target site sequences which hybridize to 20 nucleotides of a guide sequence and that have a protospacer-adjacent motif (PAM) following the 20 nucleotides of the target sequence.

[0246] A vector can be operably linked to an enzyme-coding sequence encoding a CRISPR enzyme, such as a Cas protein. Non-limiting examples of Cas proteins include Cas1, Cas1B, Cas2, Cas3, Cas4, Cas5, Cas5d, Cas5t, Cas5h, Cas5a, Cash, Cas7, Cas8, Cas9 (also known as Csn1 or Csx12), Cas10, Csy1, Csy2, Csy3, Csy4, Cse1, Cse2, Cse3, Cse4, Cse5e, Csc1, Csc2, Csa5, Csn1, Csn2, Csm1, Csm2, Csm3, Csm4, Csm5, Csm6, Cmr1, Cmr3, Cmr4, Cmr5, Cmr6, Csb1, Csb2, Csb3, Csx17, Csx14, Csx10, Csx16, CsaX, Csx3, Csx1, Csx1S, Csf1, Csf2, CsO, Csf4, Csd1, Csd2, Cst1, Cst2, Csh1, Csh2, Csa1, Csa2, Csa3, Csa4, Csa5, homologues thereof, or modified versions thereof. An unmodified CRISPR enzyme can have DNA cleavage activity, such as Cas9. A CRISPR enzyme can direct cleavage of one or both strands at a target sequence, such as within a target sequence and/or within a complement of a target sequence. For example, a CRISPR enzyme can direct cleavage of one or both strands within about 1, 2, 3, 4, 5, 6, 7, 8, 9, 10, 15, 20, 25, 50, 100, 200, 500, or more base pairs from the first or last nucleotide of a target sequence. A vector that encodes a CRISPR enzyme that is mutated to with respect, to a corresponding wild-type enzyme such that the mutated CRISPR enzyme lacks the ability to cleave one or both strands of a target polynucleotide containing a target sequence can be used.

[0247] A vector that encodes a CRISPR enzyme comprising one or more nuclear localization sequences (NLSs) can be used. For example, there can be or be about 1, 2, 3, 4, 5, 6, 7, 8, 9, 10 NLSs used. A CRISPR enzyme can comprise the NLSs at or near the ammo-terminus, about or more than about 1, 2, 3, 4, 5, 6, 7, 8, 9, 10 NLSs at or near the carboxy-terminus, or any combination of these (e.g., one or more NLS at the ammo-terminus and one or more NLS at the carboxy terminus). When more than one NLS is present, each can be selected independently of others, such that a single NLS can be present in more than one copy and/or in combination with one or more other NLSs present in one or more copies.

[0248] CRISPR enzymes used in the methods can comprise at most 6 NLSs. An NLS is considered near the N- or C-terminus when the nearest amino acid to the NLS is within about 50 amino acids along a polypeptide chain from the N- or C-terminus, e.g., within 1, 2, 3, 4, 5, 10, 15, 20, 25, 30, 40, or 50 amino acids.

### Guide RNA

[0249] As used herein, the term “guide RNA” and its grammatical equivalents can refer to an RNA which can be specific for a target DNA and can form a complex with Cas protein. An RNA/Cas complex can assist in “guiding” Cas protein to a target DNA.

[0250] A method disclosed herein also can comprise introducing into a cell or embryo at least one guide RNA or nucleic acid, e.g., DNA encoding at least one guide RNA. A guide RNA can interact with a RNA-guided endonuclease to direct the endonuclease to a specific target site, at which site the 5′ end of the guide RNA base pairs with a specific protospacer sequence in a chromosomal sequence.

[0251] A guide RNA can comprise two RNAs, e.g., CRISPR RNA (crRNA) and transactivating crRNA (tracrRNA). A guide RNA can sometimes comprise a single-chain RNA, or single guide RNA (sgRNA) formed by fusion of a portion (e.g., a functional portion) of crRNA and tracrRNA. A guide RNA can also be a dual RNA comprising a crRNA and a tracrRNA. Furthermore, a crRNA can hybridize with a target DNA.

[0252] As discussed above, a guide RNA can be an expression product. For example, a DNA that encodes a guide RNA can be a vector comprising a sequence coding for the guide RNA. A guide RNA can be transferred into a cell or organism by transfecting the cell or organism with an isolated guide RNA or plasmid DNA comprising a sequence coding for the guide RNA and a promoter. A guide RNA can also be transferred into a cell or organism in other way, such as using virus-mediated gene delivery.

[0253] A guide RNA can be isolated. For example, a guide RNA can be transfected in the form of an isolated RNA into a cell or organism. A guide RNA can be prepared by in vitro transcription using any in vitro transcription system known in the art. A guide RNA can be transferred to a cell in the form of isolated RNA rather than in the form of plasmid comprising encoding sequence for a guide RNA.

[0254] A guide RNA can comprise three regions: a first region at the 5′ end that can be complementary to a target site in a chromosomal sequence, a second internal region that can form a stem loop structure, and a third 3′ region that can be single-stranded. A first region of each guide RNA can also be different such that each guide RNA guides a fusion protein to a specific target site. Further, second and third regions of each guide RNA can be identical in all guide RNAs.

[0255] A first region of a guide RNA can be complementary to sequence at a target site in a chromosomal sequence such that the first region of the guide RNA can base pair with the target site. In some cases, a first region of a guide RNA can comprise from or from about 10 nucleotides to 25 nucleotides (i.e., from 10 nts to 25 nts; or from about 10 nts to about 25 nts; or from 10 nts to about 25 nts; or from about 10 nts to 25 nts) or more. For example, a region of base pairing between a first region of a guide RNA and a target site in a chromosomal sequence can be or can be about 10, 11, 12, 13, 14, 15, 16, 17, 18, 19, 20, 22, 23, 24, 25, or more nucleotides in length. Sometimes, a first region of a guide RNA can be or can be about 19, 20, or 21 nucleotides in length.

[0256] A guide RNA can also comprises a second region that forms a secondary structure. For example, a secondary structure formed by a guide RNA can comprise a stem (or hairpin) and a loop. A length of a loop and a stem can vary. For example, a loop can range from or from about 3 to 10 nucleotides in length, and a stem can range from or from about 6 to 20 base pairs in length. A stem can comprise one or more bulges of 1 to 10 or about 10 nucleotides. The overall length of a second region can range from or from about 16 to 60 nucleotides in length. For example, a loop can be or can be about 4 nucleotides in length and a stem can be or can be about 12 base pairs.

[0257] A guide RNA can also comprise a third region at the 3′ end that can be essentially single-stranded. For example, a third region is sometimes not complementarity to any chromosomal sequence in a cell of interest and is sometimes not complementarity to the rest of a guide RNA. Further, the length of a third region can vary. A third region can be more than or more than about 4 nucleotides in length. For example, the length of a third region can range from or from about 5 to 60 nucleotides in length.

[0258] A guide RNA can be introduced into a cell or embryo as an RNA molecule. For example, a RNA molecule can be transcribed in vitro and/or can be chemically synthesized. An RNA can be transcribed from a synthetic DNA molecule, e.g., a gBlocks® gene fragment. A guide RNA can then be introduced into a cell or embryo as an RNA molecule. A guide RNA can also be introduced into a cell or embryo in the form of a non-RNA nucleic acid molecule, e.g., DNA molecule. For example, a DNA encoding a guide RNA can be operably linked to promoter control sequence for expression of the guide RNA in a cell or embryo of interest. A RNA coding sequence can be operably linked to a promoter sequence that is recognized by RNA polymerase III (Pol III). Plasmid vectors that can be used to express guide RNA include, but are not limited to, px330 vectors and px333 vectors. In some cases, a plasmid vector (e.g., px333 vector) can comprise two guide RNA-encoding DNA sequences.

[0259] A DNA sequence encoding a guide RNA can also be part of a vector. Further, a vector can comprise additional expression control sequences (e.g., enhancer sequences, Kozak sequences, polyadenylation sequences, transcriptional termination sequences, etc.), selectable marker sequences (e.g., antibiotic resistance genes), origins of replication, and the like. A DNA molecule encoding a guide RNA can also be linear. A DNA molecule encoding a guide RNA can also be circular.

[0260] When DNA sequences encoding an RNA-guided endonuclease and a guide RNA are introduced into a cell, each DNA sequence can be part of a separate molecule (e.g., one vector containing an RNA-guided endonuclease coding sequence and a second vector containing a guide RNA coding sequence) or both can be part of a same molecule (e.g., one vector containing coding (and regulatory) sequence for both an RNA-guided endonuclease and a guide RNA).

[0261] Guide RNA can target a gene in a pig or a pig cell. In some cases, guide RNA can target a pig NLRC5 gene, e.g., sequences listed in Table 4. In some cases, guide RNA can be designed to target pig NLRC5, GGTA1 or CMAH gene. Exemplary oligonucleotides for making the guide RNA are listed in Table 5.

TABLE 4
Exemplary Sequences of the NLRC5 gene
to be targeted by guide RNAs

| SEQ ID | |
|---|---|
| No. | Sequence (5′-3′) |
| 61 | ggggaggaagaacttcacct |
| 62 | gtaggacgaccctctgtgtg |
| 63 | gaccctctgtgtggggtctg |
| 64 | ggctcggttccattgcaaga |
| 65 | gctcggttccattgcaagat |
| 66 | ggttccattgcaagatgggc |
| 67 | gtcccctcctgagtgtcgaa |
| 68 | gcctcaggtacagatcaaaa |
| 69 | ggacctgggtgccaggaacg |
| 70 | gtacccagagtcagatcacc |
| 71 | gtacccagagtcagatcacc |
| 72 | gtgcccttcgacactcagga |
| 73 | gtgcccttcgacactcagga |
| 74 | gtgcccttcgacactcagga |
| 75 | gggggccccaaggcagaaga |
| 76 | ggcagtcttccagtacctgg |

TABLE 5
Exemplary oligonucleotides for making guide RNA constructs

| | SEQ ID | | SEQ ID | |
|---|---|---|---|---|
| Gene | No. | Forward sequence (5′ to 3′) | No. | Reverse sequence (5′ to 3′) |
| NLRC5 | 77 | acaccggggaggaagaacttcacctg | 78 | aaaacaggtgaagttcttcctccccg |
| NLRC5 | 79 | acaccgtaggacgaccctctgtgtgg | 80 | aaaaccacacagagggtcgtcctacg |
| NLRC5 | 81 | acaccgaccctctgtgtggggtctgg | 82 | aaaaccagaccccacacagagggtcg |
| NLRC5 | 83 | acaccggctcggttccattgcaagag | 84 | aaaactcttgcaatggaaccgagccg |
| NLRC5 | 85 | acaccgctcggttccattgcaagatg | 86 | aaaacatcttgcaatggaaccgagcg |
| NLRC5 | 87 | acaccggttccattgcaagatgggcg | 88 | aaaacgcccatcttgcaatggaaccg |
| NLRC5 | 89 | acaccgtcccctcctgagtgtcgaag | 90 | aaaacttcgacactcaggaggggacg |
| NLRC5 | 91 | acaccgcctcaggtacagatcaaaag | 92 | aaaacttttgatctgtacctgaggcg |
| NLRC5 | 93 | acaccggacctgggtgccaggaacgg | 94 | aaaaccgttcctggcacccaggtccg |
| NLRC5 | 95 | acaccgtacccagagtcagatcaccg | 96 | aaaacggtgatctgactctgggtacg |
| NLRC5 | 97 | acaccgtacccagagtcagatcaccg | 98 | aaaacggtgatctgactctgggtacg |
| NLRC5 | 99 | acaccgtgcccttcgacactcaggag | 100 | aaaactcctgagtgtcgaagggcacg |
| NLRC5 | 101 | acaccgtgcccttcgacactcaggag | 102 | aaaactcctgagtgtcgaagggcacg |
| NLRC5 | 103 | acaccgtgcccttcgacactcaggag | 104 | aaaactcctgagtgtcgaagggcacg |
| NLRC5 | 105 | acaccgggggccccaaggcagaagag | 106 | aaaactcttctgccttggggcccccg |
| NLRC5 | 107 | acaccggcagtcttccagtacctggg | 108 | aaaacccaggtactggaagactgccg |
| GGTA1 | 109 | caccgagaaaataatgaatgtcaa | 110 | aaacttgacattcattattttctc |
| CMAH | 111 | caccgagtaaggtacgtgatctgt | 112 | aaacacagatcacgtaccttactc |

### Homologous Recombination

[0262] Homologous recombination can also be used for any of the relevant genetic modifications as disclosed herein. Homologous recombination can permit site-specific modifications in endogenous genes and thus novel modifications can be engineered into a genome. For example, the ability of homologous recombination (gene conversion and classical strand breakage/rejoining) to transfer genetic sequence information between DNA molecules can render targeted homologous recombination and can be a powerful method in genetic engineering and gene manipulation.

[0263] Cells that have undergone homologous recombination can be identified by a number of methods. For example, a selection method can detect an absence of an immune response against a cell, for example by a human anti-gal antibody. A selection method can also include assessing a level of clotting in human blood when exposed to a cell or tissue. Selection via antibiotic resistance can be used for screening.

### Making Transgenic Non-Human Animals

[0264] Random Insertion

[0265] One or more transgenes of the methods described herein can be inserted randomly to any locus in a genome of a cell. These transgenes can be functional if inserted anywhere in a genome. For instance, a transgene can encode its own promoter or can be inserted into a position where it is under the control of an endogenous promoter. Alternatively, a transgene can be inserted into a gene, such as an intron of a gene or an exon of a gene, a promoter, or a non-coding region.

[0266] A DNA encoding a transgene sequences can be randomly inserted into a chromosome of a cell. A random integration can result from any method of introducing DNA into a cell known to one of skill in the art. This can include, but is not limited to, electroporation, sonoporation, use of a gene gun, lipotransfection, calcium phosphate transfection, use of dendrimers, microinjection, use of viral vectors including adenoviral, AAV, and retroviral vectors, and/or group II ribozymes.

[0267] A DNA encoding a transgene can also be designed to include a reporter gene so that the presence of the transgene or its expression product can be detected via activation of the reporter gene. Any reporter gene known in the art can be used, such as those disclosed above. By selecting in cell culture those cells in which a reporter gene has been activated, cells can be selected that contain a transgene.

[0268] A DNA encoding a transgene can be introduced into a cell via electroporation. A DNA can also be introduced into a cell via lipofection, infection, or transformation. Electroporation and/or lipofection can be used to transfect fibroblast cells.

[0269] Expression of a transgene can be verified by an expression assay, for example, qPCR or by measuring levels of RNA. Expression level can be indicative also of copy number. For example, if expression levels are extremely high, this can indicate that more than one copy of a transgene was integrated in a genome. Alternatively, high expression can indicate that a transgene was integrated in a highly transcribed area, for example, near a highly expressed promoter. Expression can also be verified by measuring protein levels, such as through Western blotting.

### Site Specific Insertion

[0270] Inserting one or more transgenes in any of the methods disclosed herein can be site-specific. For example, one or more transgenes can be inserted adjacent to a promoter, for example, adjacent to or near a Rosa26 promoter.

[0271] Modification of a targeted locus of a cell can be produced by introducing DNA into cells, where the DNA has homology to the target locus. DNA can include a marker gene, allowing for selection of cells comprising the integrated construct. Homologous DNA in a target vector can recombine with a chromosomal DNA at a target locus. A marker gene can be flanked on both sides by homologous DNA sequences, a 3′ recombination arm, and a 5′ recombination arm.

[0272] A variety of enzymes can catalyze insertion of foreign DNA into a host genome. For example, site-specific recombinases can be clustered into two protein families with distinct biochemical properties, namely tyrosine recombinases (in which DNA is covalently attached to a tyrosine residue) and serine recombinases (where covalent attachment occurs at a serine residue). In some cases, recombinases can comprise Cre, fC31 integrase (a serine recombinase derived from Streptomyces phage fC31), or bacteriophage derived site-specific recombinases (including Flp, lambda integrase, bacteriophage HK022 recombinase, bacteriophage R4 integrase and phage TP901-1 integrase).

[0273] Expression control sequences can also be used in constructs. For example, an expression control sequence can comprise a constitutive promoter, which is expressed in a wide variety of cell types. For example, among suitable strong constitutive promoters and/or enhancers are expression control sequences from DNA viruses (e.g., SV40, polyoma virus, adenoviruses, adeno-associated virus, pox viruses, CMV, HSV, etc.) or from retroviral LTRs. Tissue-specific promoters can also be used and can be used to direct expression to specific cell lineages. While experiments discussed in the Examples below will be conducted using a Rosa26 gene promoter, other Rosa26-related promoters capable of directing gene expression can be used to yield similar results, as will be evident to those of skill in the art. Therefore, the description herein is not meant to be limiting, but rather disclose one of many possible examples. In some cases, a shorter Rosa26 5′-upstream sequences, which can nevertheless achieve the same degree of expression, can be used. Also useful are minor DNA sequence variants of a Rosa26 promoter, such as point mutations, partial deletions or chemical modifications.

[0274] A Rosa26 promoter is expressible in mammals. For example, sequences that are similar to the 5′ flanking sequence of a pig Rosa26 gene, including, but not limited to, promoters of Rosa26 homologues of other species (such as human, cattle, mouse, sheep, goat, rabbit and rat), can also be used. A Rosa26 gene can be sufficiently conserved among different mammalian species and other mammalian Rosa26 promoters can also be used.

[0275] The CRISPR/Cas system can be used to perform site specific insertion. For example, a nick on an insertion site in the genome can be made by CRISPR/cas to facilitate the insertion of a transgene at the insertion site.

[0276] The methods described herein, can utilize techniques which can be used to allow a DNA or RNA construct entry into a host cell include, but are not limited to, calcium phosphate/DNA coprecipitation, microinjection of DNA into a nucleus, electroporation, bacterial protoplast fusion with intact cells, transfection, lipofection, infection, particle bombardment, sperm mediated gene transfer, or any other technique known by one skilled in the art.

[0277] Certain aspects disclosed herein can utilize vectors. Any plasmids and vectors can be used as long as they are replicable and viable in a selected host. Vectors known in the art and those commercially available (and variants or derivatives thereof) can be engineered to include one or more recombination sites for use in the methods. Vectors that can be used include, but not limited to eukaryotic expression vectors such as pFastBac, pFastBacHT, pFastBacDUAL, pSFV, and pTet-Splice (Invitrogen), pEUK-C1, pPUR, pMAM, pMAMneo, pBI101, pBI121, pDR2, pCMVEBNA, and pYACneo (Clontech), pSVK3, pSVL, pMSG, pCH110, and pKK232-8 (Pharmacia, Inc.), p3′SS, pXT1, pSG5, pPbac, pMbac, pMClneo, and pOG44 (Stratagene, Inc.), and pYES2, pAC360, pBlueBa-cHis A, B, and C, pVL1392, pBlueBac111, pCDM8, pcDNA1, pZeoSV, pcDNA3, pREP4, pCEP4, and pEBVHis (Invitrogen, Corp.), and variants or derivatives thereof.

[0278] These vectors can be used to express a gene, e.g., a transgene, or portion of a gene of interest. A gene of portion or a gene can be inserted by using known methods, such as restriction enzyme-based techniques.

### Making Genetically Modified Non-Human Animals Using a Zygote

[0279] Making a genetically modified non-human animal using a nucleic acid from another genetically modified non-human animal can be done using various techniques known in the art, for example, such as by zygote manipulation.

[0280] For example, zygotes can be used to make a similar genetically modified non-human animal. A method of making similar genetically modified non-human animals comprising a) producing a cell with reduced expression of one or more genes and/or comprise exogenous polynucleotides disclosed herein, b) generating an embryo using the resulting cell of a); and c) growing the embryo into the genetically modified non-human animal. The cell of a) can be produced by disrupting (e.g., reducing expression) one or more genes in the cell (e.g., as described above in a genetically modified non-human animals).

[0281] This method can be used to make a similar genetically modified non-human animal disclosed herein. For example, a method of making a genetically modified non-human animal can comprise: a) producing a cell with reduced expression of one or more genes disclosed herein e.g. (as disclosed above), where the one or more genes comprise NLRC5, TAP1, and/or C3; b) generating an embryo from the resulting cell of a); and c) growing the embryo into the genetically modified non-human animal.

[0282] Cells used in this method can be from any disclosed genetically modified cells as described herein. For example, disrupted genes are not limited to NRLC5, TAP1, and/or C3. Other combinations of gene disruptions and transgenes can be found throughout the disclosure herein. Furthermore, a genetically modified cell can be of any origin, such as from a non-human animal (as described herein) or genetically modified cells (as described herein).

[0283] A cell of a) in the methods disclosed herein can be a zygote (e.g., a cell formed by joining of a sperm and an ovum). A zygote can be formed by joining: i) of a sperm of a wild-type non-human animal and an ovum of a wild-type non-human animal; ii) a sperm of a wild-type non-human animal and an ovum of a genetically modified non-human animal; iii) a sperm of a genetically modified non-human animal and an ovum of a wild-type non-human animal; and/or iv) a sperm of a genetically modified non-human animal and an ovum of a genetically modified non-human animal. A non-human animal can be a pig.

[0284] One or more genes in a cell of a) in the methods disclosed herein can be disrupted by generating breaks at desired locations in a genome). For example, breaks can be double-stranded breaks (DSBs). DSBs can be generated using a nuclease comprising Cas (e.g., Cas9), ZFN, TALEN, and maganuclease. Nuclease can be a naturally-existing or a modified nuclease. A nucleic acid encoding a nuclease can also be delivered to a cell, where the nuclease is expressed.

[0285] Following DSBs, one or more genes can be disrupted by DNA repairing mechanisms, such as homologous recombination (HR) and/or nonhomologous end-joining (NHEJ).

[0286] A method can comprise inserting one or more transgenes to a genome of the cell of a). One or more transgenes can comprise ICP47, CD46, CD55, CD59, HLA-E, HLA-G (e.g., HLA-G1, HLA-G2, HLA-G3, HLA-G4, HLA-G5, HLA-G6, or HLA-G7), B2M, any functional fragments thereof, and/or any combination thereof.

[0287] A method provided herein can comprise inserting one or more transgenes where one or more transgenes can be any transgene in any non-human animal or genetically modified cell disclosed herein. Transgenes can be inserted into a genome of a non-human animal or genetically modified cell in a random or targeted manner, as described herein.

[0288] Transgenes can also be inserted to a specific locus in a genome of a non-human animal or genetically modified cell, as disclosed herein. For example, a transgene can be inserted adjacent to a promoter. A transgene can be inserted near a promoter that can be at least or at least about 1, 10, 50, 100, 500, or 1000 base pairs from a promoter. A gene in some cases and be inserted into a different chromosome and can still be control by a promoter. Transgenes can also be inserted at the 3′ region of the sense strand from a promoter (e.g., downstream of a promoter). Alternatively, transgenes can be inserted at the 5′ region of the sense strand from a promoter (e.g., upstream of a promoter). Transgenes can be inserted adjacent to a porcine promoter. For example, transgenes can be inserted adjacent to porcine Rosa26 promoter.

[0289] A promoter that can be used herein are described throughout the application. For example, a promoter that can be used in methods can be a ubiquitous, tissue-specific or an inducible promoter. Expression of a transgene that is inserted adjacent to a promoter can be regulated. For example, if a transgene is inserted near or next to a ubiquitous promoter, the transgene will be expressed in all cells of a non-human animal. Some ubiquitous promoters can be a CAGGS promoter, an hCMV promoter, a PGK promoter, an SV40 promoter, or a Rosa26 promoter.

[0290] A promoter can be homologous to a promoter sequence present within the genome of a human or a non-human animal, such as pig, human, cattle, sheep, goat, rabbit, mouse or rat. A promoter can exhibit at least or at least about 50%, 60%, 70%, 80, 90%, 95%, 96%, 97%, 98%, or 99% homology to a promoter sequence present within the genome of a human or a non-human animal. A promoter can exhibit 100% homology to a promoter sequence present within the genome of a human or a non-human animal. A promoter can also exhibit at least or at least about 50%, 60%, 70%, 80, 90%, 95%, 96%, 97%, 98%, or 99% identity to a promoter sequence present within the genome of a human or a non-human animal. A promoter can also exhibit at 100% identity to a promoter sequence present within the genome of a human or a non-human animal.

### Making a Similar Genetically Modified Non-Human Animal Using Cell Nuclear Transfer

[0291] An alternative method of making a genetically modified non-human animal can be by cell nuclear transfer. A method of making genetically modified non-human animals can comprise a) producing a cell with reduced expression of one or more genes and/or comprise exogenous polynucleotides disclosed herein; b) providing a second cell and transferring a nucleus of the resulting cell from a) to the second cell to generate an embryo generating an embryo; c) growing the embryo into the genetically modified non-human animal. A cell in this method can be an enucleated cell. The cell of a) can be made using any methods, e.g., gene disruption and/or insertion described herein or known in the art.

[0292] This method can be used to make a similar genetically modified non-human animal disclosed herein. For example, a method of making a genetically modified non-human animal can comprise: a) producing a cell with reduced expression of NLRC5, TAP1 and/or C3; b) providing a second cell and transferring a nucleus of the resulting cell from a) to the second cell to generate an embryo; and c) growing the embryo to the genetically modified non-human animal. A cell in this method can be an enucleated cell.

[0293] Cells used in this method can be from any disclosed genetically modified cells as described herein. For example, disrupted genes are not limited to NRLC5, TAP1, and/or C3. Other combinations of gene disruptions and transgenes can be found throughout disclosure herein. For example, a method can comprise providing a first cell from any non-human animal disclosed herein; providing a second cell; transferring a nucleus of the first cell of a) to the second cell of b); generating an embryo from the product of c); and growing the embryo to the genetically modified non-human animal.

[0294] A cell of a) in the methods disclosed herein can be a zygote. The zygote can be formed by joining: i) of a sperm of a wild-type non-human animal and an ovum of a wild-type non-human animal; ii) a sperm of a wild-type non-human animal and an ovum of a genetically modified non-human animal; iii) a sperm of a genetically modified non-human animal and an ovum of a wild-type non-human animal; and/or iv) a sperm of a genetically modified non-human animal and an ovum of a genetically modified non-human animal. A non-human animal can be a pig.

[0295] One or more genes in a cell of a) in the methods disclosed herein can be disrupted by generating breaks at desired locations in the genome. For example, breaks can be double-stranded breaks (DSBs). DSBs can be generated using a nuclease comprising Cas (e.g., Cas9), ZFN, TALEN, and maganuclease. Nuclease can be a naturally-existing or a modified nuclease. A nucleic acid encoding a nuclease can be delivered to a cell, where the nuclease is expressed. Cas9 and guide RNA targeting a gene in a cell can be delivered to the cell. In some cases, mRNA molecules encoding Cas9 and guide RNA can be injected into a cell. In some cases, a plasmid encoding Cas9 and a different plasmid encoding guide RNA can be delivered into a cell (e.g., by infection). In some cases, a plasmid encoding both Cas9 and guide RNA can be delivered into a cell (e.g., by infection).

[0296] As described above, following DSBs, one or more genes can be disrupted by DNA repairing mechanisms, such as homologous recombination (HR) and/or nonhomologous end-joining (NHEJ). A method can comprise inserting one or more transgenes to a genome of the cell of a). One or more transgenes can comprise ICP47, CD46, CD55, CD59, HLA-E, HLA-G (e.g., HLA-G1, HLA-G2, HLA-G3, HLA-G4, HLA-G5, HLA-G6, or HLA-G7), B2M, any functional fragments thereof, and/or any combination thereof.

[0297] The methods provided herein can comprise inserting one or more transgenes where the one or more transgenes can be any transgene in any non-human animal or genetically modified cell disclosed herein.

[0298] Also disclosed herein are methods of making a non-human animal using a cell from a genetically modified non-human animal. A cell can be from any genetically modified non-human animal disclosed herein. A method can comprise: a) providing a cell from a genetically identified non-human animal; b) providing a cell; c) transferring a nucleus of the cell of a) to the cell of b); c) generating an embryo from the product of c); and d) growing the embryo to the genetically modified non-human animal. A cell of this method can be an enucleated cell.

[0299] Further, cells of a) in the methods can be any cell from a genetically modified non-human animal. For example, a cell of a) in methods disclosed herein can be a somatic cell, such as a fibroblast cell or a fetal fibroblast cell.

[0300] An enucleated cell in the methods can be any cell from an organism. For example, an enucleated cell is a porcine cell. An enucleated cell can be an ovum, for example, an enucleated unfertilized ovum.

[0301] Genetically modified non-human animal disclosed herein can be made using any suitable techniques known in the art. For example, these techniques include, but are not limited to, microinjection (e.g., of pronuclei), sperm-mediated gene transfer, electroporation of ova or zygotes, and/or nuclear transplantation.

[0302] A method of making similar genetically modified non-human animals can comprise a) disrupting one or more genes in a cell, b) generating an embryo using the resulting cell of a); and c) growing the embryo into the genetically modified non-human animal.

[0303] A cell of a) in the methods disclosed herein can be a somatic cell. There is no limitation on a type or source of a somatic cell. For example, it can be from a pig or from cultured cell lines or any other viable cell. A cell can also be a dermal cell, a nerve cell, a cumulus cell, an oviduct epithelial cell, a fibroblast cell (e.g., a fetal fibroblast cell), or hepatocyte. A cell of a) in the methods disclosed herein can be from a wild-type non-human animal, a genetically modified non-human animal, or a genetically modified cell. Furthermore, a cell of b) can be an enucleated ovum (e.g., an enucleated unfertilized ovum).

[0304] Enucleation can also be performed by known methods. For example, metaphase II oocytes can be placed in either HECM, optionally containing or containing about 7-10 micrograms per milliliter cytochalasin B, for immediate enucleation, or can be placed in a suitable medium (e.g., an embryo culture medium such as CR1aa, plus 10% estrus cow serum), and then enucleated later (e.g., not more than 24 hours later or 16-18 hours later). Enucleation can also be accomplished microsurgically using a micropipette to remove the polar body and the adjacent cytoplasm. Oocytes can then be screened to identify those of which have been successfully enucleated. One way to screen oocytes can be to stain the oocytes with or with about 3-10 microgram per milliliter 33342 Hoechst dye in suitable holding medium, and then view the oocytes under ultraviolet irradiation for less than 10 seconds. Oocytes that have been successfully enucleated can then be placed in a suitable culture medium, for example, CR1aa plus 10% serum. The handling of oocytes can also be optimized for nuclear transfer.

[0305] The embryos generated herein can be transferred to surrogate non-human animals (e.g., pigs) to produce offspring (e.g., piglets). For example, the embryos can be transferred to the oviduct of recipient gilts on the day or 1 day after estrus e.g., following mid-line laparotomy under general anesthesia. Pregnancy can be diagnosed, e.g., by ultrasound. Pregnancy can be diagnosed after or after about 28 days from the transfer. The pregnancy can then checked at or at about 2-week intervals by ultrasound examination. All of the microinjected offspring (e.g., piglets) can be delivered by natural birth. Information of the pregnancy and delivery (e.g., time of pregnancy, rates of pregnancy, number of offspring, survival rate, etc.) can be documented. The genotypes and phenotypes of the offspring can be measured using any methods described through the application such as sequencing (e.g., next-generation sequencing).

[0306] Cultured cells can be used immediately for nuclear transfer (e.g., somatic cell nuclear transfer), embryo transfer, and/or inducing pregnancy, allowing embryos derived from healthy stable genetic modifications give rise to offspring (e.g., piglets). Such approach can reduce time and cost, e.g., months of costly cell screening that may result in genetically modified cells fail to produce healthy piglets.

[0307] Embryo growing and transferring can be performed using standard procedures used in the embryo growing and transfer industry. For example, surrogate mothers can be used. Embryos can also be grown and transferred in culture, for example, by using incubators. In some cases, an embryo can be transferred to an animal, e.g., a surrogate animal, to establish a pregnancy.

[0308] It can be desirable to replicate or generate a plurality of genetically modified non-human animals that have identical genotypes and/or phenotypes disclosed herein. For example, a genetically modified non-human animal can be replicated by breeding (e.g., selective breading). A genetically modified non-human animal can be replicated by nuclear transfer (e.g., somatic cell nuclear transfer) or introduction of DNA into a cell (e.g., oocytes, sperm, zygotes or embryonic stem cells). These methods can be reproduced a plurality of times to replicate or generate a plurality of a genetically modified non-human animal disclosed herein. In some cases, cells can be isolated from the fetuses of a pregnant genetically modified non-human animal. The isolated cells (e.g., fetal cells) can be used for generating a plurality of genetically modified non-human animals similar or identical to the pregnant animal. For example, the isolated fetal cells can provide donor nuclei for generating genetically modified animals by nuclear transfer, (e.g., somatic cell nuclear transfer).

### V. Methods of Use

[0309] Cells, organs, and/or tissues can be extracted from a non-human animal as described herein. Cells, organs, and/or tissues can be genetically altered ex vivo and used accordingly. These cells, organs, and/or tissues can be used for cell-based therapies. These cells, organs, and/or tissues can be used to treat or prevent disease in a recipient (e.g., a human or non-human animal). Surprisingly, the genetic modifications as described herein can help prevent rejection. Additionally, cells, organs, and/or tissues can be made into tolerizing vaccines to also help tolerize the immune system to transplantation. Further, tolerizing vaccines can temper the immune system, including, abrogating autoimmune responses.

[0310] Disclosed herein are methods for treating a disease in a subject in need thereof can comprise administering a tolerizing vaccine to the subject; administering a pharmaceutical agent that inhibits T cell activation to the subject; and transplanting a genetically modified cell to the subject. The pharmaceutical agent that inhibits T cell activation can be an antibody. The antibody can be an anti-CD40 antibody disclosed herein. The cell transplanted to the subject can be any genetically modified cell described throughout the application. The tissue or organ transplanted to the subject can comprise one or more of the genetically modified cells. In some cases, the methods can further comprise administering one or more immunosuppression agent described in the application, such as further comprising providing to the recipient one or more of a B-cell depleting antibody, an mTOR inhibitor, a TNF-alpha inhibitor, a IL-6 inhibitor, a nitrogen mustard alkylating agent (e.g., cyclophosphamide), and a complement C3 or C5 inhibitor.

[0311] Also disclosed herein are methods for treating a disease, comprising transplanting one or more cells to a subject in need thereof. The one or more cells can be any genetically modified cells disclosed herein. In some cases, the methods can comprise transplanting a tissue or organ comprising the one or more cells (e.g., genetically modified cells) to the subject in need thereof.

[0312] Described herein are methods of treating or preventing a disease in a recipient (e.g., a human or non-human animal) comprising transplanting to the recipient (e.g., a human or non-human animal) one or more cells (including organs and/or tissues) derived from a genetically modified non-human animal comprising one or more genes with reduced expression. One or more cells can be derived from a genetically modified non-human animal as described throughout.

[0313] The methods disclosed herein can be used for treating or preventing disease including, but not limited to, diabetes, cardiovascular diseases, lung diseases, liver diseases, skin diseases, or neurological disorders. For example, the methods can be used for treating or preventing Parkinson's disease or Alzheimer's disease. The methods can also be used for treating or preventing diabetes, including type 1, type 2, cystic fibrosis related, surgical diabetes, gestational diabetes, mitochondrial diabetes, or combination thereof. In some cases, the methods can be used for treating or preventing hereditary diabetes or a form of hereditary diabetes. Further, the methods can be used for treating or preventing type 1 diabetes. The methods can also be used for treating or preventing type 2 diabetes. The methods can be used for treating or preventing pre-diabetes.

[0314] For example, when treating diabetes, genetically modified splenocytes can be fixed with ECDI and given to a recipient. Further, genetically modified pancreatic islet cells can be grafted into the same recipient to produce insulin. Genetically modified splenocytes and pancreatic islet cells can be genetically identical and can also be derived from the same genetically modified non-human animal.

[0315] Provided herein include i) genetically modified cells, tissues or organs for use in administering to a subject in need thereof to treat a condition in the subject; ii) a tolerizing vaccine for use in immunotolerizing the subject to a graft, where the tolerizing vaccine comprise a genetically modified cell, tissue, or organ; iii) one or more pharmaceutical agents for use in inhibiting T cell activation, B cell activation, dendritic cell activation, or a combination thereof in the subject; or iv) any combination thereof.

[0316] Also provided herein include genetically modified cells, tissues or organs for use in administering to a subject in need thereof to treat a condition in the subject. The subject can have been or become tolerized to the genetically modified cell, tissue or organ by use of a tolerizing vaccine. Further, the subject can be administered one or more pharmaceutical agents that inhibit T cell activation, B cell activation, dendritic cell activation, or a combination thereof.

### Transplantation

[0317] The methods disclosed herein can comprise transplanting. Transplanting can be autotransplanting, allotransplanting, xenotransplanting, or any other transplanting. For example, transplanting can be xenotransplanting. Transplanting can also be allotransplanting.

[0318] “Xenotransplantation” and its grammatical equivalents as used herein can encompass any procedure that involves transplantation, implantation, or infusion of cells, tissues, or organs into a recipient, where the recipient and donor are different species. Transplantation of the cells, organs, and/or tissues described herein can be used for xenotransplantation in into humans. Xenotransplantation includes but is not limited to vascularized xenotransplant, partially vascularized xenotransplant, unvascularized xenotransplant, xenodressings, xenobandages, and xenostructures.

[0319] “Allotransplantation” and its grammatical equivalents as used herein can encompasses any procedure that involves transplantation, implantation, or infusion of cells, tissues, or organs into a recipient, where the recipient and donor are the same species. Transplantation of the cells, organs, and/or tissues described herein can be used for allotransplantation in into humans. Allotransplantation includes but is not limited to vascularized allotransplant, partially vascularized allotransplant, unvascularized allotransplant, allodressings, allobandages, and allostructures.

[0320] After treatment (e.g., any of the treatment as disclosed herein), transplant rejection can be improved as compared to when one or more wild-type cells is transplanted into a recipient. For example, transplant rejection can be hyperacute rejection. Transplant rejection can also be acute rejection. Other types of rejection can include chronic rejection. Transplant rejection can also be cell-mediated rejection or T cell-mediated rejection. Transplant rejection can also be natural killer cell-mediated rejection.

[0321] “Improving” and its grammatical equivalents as used herein can mean any improvement recognized by one of skill in the art. For example, improving transplantation can mean lessening hyperacute rejection, which can encompass a decrease, lessening, or diminishing of an undesirable effect or symptom.

[0322] The disclosure describes methods of treatment or preventing diabetes or prediabetes. For example, the methods include but are not limited to, administering one or more pancreatic islet cell(s) from a donor non-human animal described herein to a recipient, or a recipient in need thereof. The methods can be transplantation or, in some cases, xenotransplantation. The donor animal can be a non-human animal. A recipient can be a primate, for example, a non-human primate including, but not limited to, a monkey. A recipient can be a human and in some cases, a human with diabetes or pre-diabetes. In some cases, whether a patient with diabetes or pre-diabetes can be treated with transplantation can be determined using an algorithm, e.g., as described in Diabetes Care 2015; 38:1016-1029, which is incorporated herein by reference in its entirety.

[0323] The methods can also include methods of xenotransplantation where the transgenic cells, tissues and/or organs, e.g., pancreatic tissues or cells, provided herein are transplanted into a primate, e.g., a human, and, after transplant, the primate requires less or no immunosuppressive therapy. Less or no immunosuppressive therapy includes, but is not limited to, a reduction (or complete elimination of) in dose of the immunosuppressive drug(s)/agent(s) compared to that required by other methods; a reduction (or complete elimination of) in the number of types of immunosuppressive drug(s)/agent(s) compared to that required by other methods; a reduction (or complete elimination of) in the duration of immunosuppression treatment compared to that required by other methods; and/or a reduction (or complete elimination of) in maintenance immunosuppression compared to that required by other methods.

[0324] The methods disclosed herein can be used for treating or preventing disease in a recipient (e.g., a human or non-human animal). A recipient can be any non-human animal or a human. For example, a recipient can be a mammal. Other examples of recipient include but are not limited to primates, e.g., a monkey, a chimpanzee, a bamboo, or a human. If a recipient is a human, the recipient can be a human in need thereof. The methods described herein can also be used in non-primate, non-human recipients, for example, a recipient can be a pet animal, including, but not limited to, a dog, a cat, a horse, a wolf, a rabbit, a ferret, a gerbil, a hamster, a chinchilla, a fancy rat, a guinea pig, a canary, a parakeet, or a parrot. If a recipient is a pet animal, the pet animal can be in need thereof. For example, a recipient can be a dog in need thereof or a cat in need thereof.

[0325] Transplanting can be by any transplanting known to the art. Graft can be transplanted to various sites in a recipient. Sites can include, but not limited to, liver subcapsular space, splenic subcapsular space, renal subcapsular space, omentum, gastric or intestinal submucosa, vascular segment of small intestine, venous sac, testis, brain, spleen, or cornea. For example, transplanting can be subcapsular transplanting. Transplanting can also be intramuscular transplanting. Transplanting can be intraportal transplanting.

[0326] Transplanting can be of one or more cells, tissues, and/or organs from a human or non-human animal. For example, the tissue and/or organs can be, or the one or more cells can be from, a brain, heart, lungs, eye, stomach, pancreas, kidneys, liver, intestines, uterus, bladder, skin, hair, nails, ears, glands, nose, mouth, lips, spleen, gums, teeth, tongue, salivary glands, tonsils, pharynx, esophagus, large intestine, small intestine, rectum, anus, thyroid gland, thymus gland, bones, cartilage, tendons, ligaments, suprarenal capsule, skeletal muscles, smooth muscles, blood vessels, blood, spinal cord, trachea, ureters, urethra, hypothalamus, pituitary, pylorus, adrenal glands, ovaries, oviducts, uterus, vagina, mammary glands, testes, seminal vesicles, penis, lymph, lymph nodes or lymph vessels. The one or more cells can also be from a brain, heart, liver, skin, intestine, lung, kidney, eye, small bowel, or pancreas. The one or more cells are from a pancreas, kidney, eye, liver, small bowel, lung, or heart. The one or more cells can be from a pancreas. The one or more cells can be pancreatic islet cells, for example, pancreatic β cells. Further, the one or more cells can be pancreatic islet cells and/or cell clusters or the like, including, but not limited to pancreatic α cells, pancreatic β cells, pancreatic δ cells, pancreatic F cells (e.g., PP cells), or pancreatic c cells. In one instance, the one or more cells can be pancreatic α cells. In another instance, the one or more cells can be pancreatic β cells.

[0327] As discussed above, a genetically modified non-human animal can be used in xenograft (e.g., cells, tissues and/or organ) donation. Solely for illustrative purposes, genetically modified non-human animals, e.g., pigs, can be used as donors of pancreatic tissue, including but not limited to, pancreatic islets and/or islet cells. Pancreatic tissue or cells derived from such tissue can comprise pancreatic islet cells, or islets, or islet-cell clusters. For example, cells can be pancreatic islets which can be transplanted. More specifically, cells can be pancreatic β cells. Cells also can be insulin-producing. Alternatively, cells can be islet-like cells. Islet cell clusters can include any one or more of α, β, δ, PP or ε cells. Aptly the disease to be treated by methods and compositions herein can be diabetes. Aptly the transplantable grafts can be pancreatic islets and/or cells from pancreatic islets. Aptly the modification to the transgenic animal is to the pancreatic islets or cells from the pancreatic islets. Aptly the pancreatic islets or cells from the pancreatic islets are porcine. In some cases, cells from the pancreatic islets are or include pancreatic β cells.

[0328] Donor non-human animals can be at any stage of development including, but not limited to, fetal, neonatal, young and adult. For example, donor cells islet cells can be isolated from adult non-human animals. Donor cells, e.g., islet cells, can also be isolated from fetal or neonatal non-human animals. Donor non-human animals can be under the age of 10, 9, 8, 7, 6, 5, 4, 3, 2, or 1 year(s). For example, islet cells can be isolated from a non-human animal under the age of 6 years. Islet cells can also be isolated from a non-human animal under the age of 3 years. Donors can be non-human animals and can be any age from or from about 0 (including a fetus) to 2; 2 to 4; 4 to 6; 6 to 8; or 8 to 10 years. A non-human animal can be older than or than about 10 years. Donor cells can be from a human as well.

[0329] Islet cells can be isolated from non-human animals of varying ages. For example, islet cells can be isolated from or from about newborn to 2 year old non-human animals. Islets cells can also be isolated from or from about fetal to 2 year old non-human animals. Islets cells can be isolated from or from about 6 months old to 2 year old non-human animals. Islets cells can also be isolated from or from about 7 months old to 1 year old non-human animals. Islets cells can be isolated from or from about 2-3 year old non-human animals. In some cases, non-human animals can be less than 0 years (e.g., a fetus or embryo). In some cases, neonatal islets can be more hearty and consistent post-isolation than adult islets, can be more resistant to oxidative stress, can exhibit significant growth potential (likely from a nascent islet stem cell subpopulation), such that they can have the ability to proliferate post-transplantation and engraftment in a transplantation site.

[0330] With regards to treating diabetes, neonatal islets can have the disadvantage that it can take them up to or up to about 4-6 weeks to mature enough such that they produce significant levels of insulin, but this can be overcome by treatment with exogenous insulin for a period sufficient for the maturation of the neonatal islets. In xenograft transplantation, survival and functional engraftment of neo-natal islets can be determined by measuring donor-specific c-peptide levels, which are easily distinguished from any recipient endogenous c-peptide.

[0331] As discussed above, adult cells can be isolated. For example, adult non-human animal islets, e.g., adult porcine cells, can be isolated. Islets can then be cultured for or for about 1-3 days prior to transplantation in order to deplete the preparation of contaminating exocrine tissue. Prior to treatment, islets can be counted, and viability assessed by double fluorescent calcein-AM and propidium iodide staining. Islet cell viability >75% can be used. However, cell viability greater than or greater than about 40%, 50%, 60%, 70%, 80%, 90%, 95%, 99% can be used. For example, cells that exhibit a viability from or from about 40% to 50%; 50% to 60%; 60% to 70%; 70% to 80%; 80% to 90%; 90% to 95%, or 90% to 100% can be used. Additionally, purity can be greater than or greater than about 80% islets/whole tissue. Purity can also be at least or at least about 40%, 50%, 60%, 70%, 80%, 90%, 95%, or 99% islets/whole tissue. For example, purity can be from or can be from about 40% to 50%; 50% to 60%; 60% to 70%; 70% to 80%; 80% to 90%; 90% to 100%; 90% to 95%, or 95% to 100%.

[0332] Functional properties of islets, including dynamic perifusion and viability, can be determined in vitro prior to treatment (Balamurugan, 2006). For example, non-human animal islet cells, e.g., transgenic porcine islet cells can be cultured in vitro to expand, mature, and/or purify them so that they are suitable for grafting.

[0333] Islet cells can also be isolated by standard collagenase digestion of minced pancreas. For example, using aseptic techniques, glands can be distended with tissue dissociating enzymes (a mixture of purified enzymes formulated for rapid dissociation of a pancreas and maximal recovery of healthy, intact, and functional islets of Langerhans, where target substrates for these enzymes are not fully identified, but are presumed to be collagen and non-collagen proteins, which comprise intercellular matrix of pancreatic acinar tissue) (1.5 mg/ml), trimmed of excess fat, blood vessels and connective tissue, minced, and digested at 37 degree C. in a shaking water bath for 15 minutes at 120 rpm. Digestion can be achieved using lignocaine mixed with tissue dissociating enzymes to avoid cell damage during digestion. Following digestion, the cells can be passed through a sterile 50 mm to 1000 mm mesh, e.g., 100 mm, 200 mm, 300 mm, 400 mm, 500 mm, 600 mm, 700 mm, 800 mm, 900 mm, or 1000 mm mesh into a sterile beaker. Additionally, a second digestion process can be used for any undigested tissue.

[0334] Islets can also be isolated from the adult pig pancreas (Brandhorst et al., 1999). The pancreas is retrieved from a suitable source pig, peri-pancreatic tissue is removed, the pancreas is divided into the splenic lobe and in the duodenal/connecting lobe, the ducts of each lobes are cannulated, and the lobes are distended with tissue dissociating enzymes. The pancreatic lobes are placed into a Ricordi chamber, the temperature is gradually increased to 28 to 32° C., and the pancreatic lobes are dissociated by means of enzymatic activity and mechanical forces. Liberated islets are separated from acinar and ductal tissue using continuous density gradients. Purified pancreatic islets are cultured for or for about 2 to 7 days, subjected to characterization, and islet products meeting all specifications are released for transplantation (Korbutt et al., 2009).

[0335] Donor cells, organs, and/or tissues before, after, and/or during transplantation can be functional. For example, transplanted cells, organs, and/or tissues can be functional for at least or at least about 1, 5, 10, 20, 30 days after transplantation. Transplanted cells, organs, and/or tissues can be functional for at least or at least about 1, 2, 3, 4, 5, 6, 7, 8, 9, 10, 11, or 12 months after transplantation. Transplanted cells, organs, and/or tissues can be functional for at least or at least about 1, 2, 3, 4, 5, 6, 7, 8, 9, 10, 15, 20, 25, or 30 years after transplantation. In some cases, transplanted cells, organs, and/or tissues can be functional for up to the lifetime of a recipient. This can indicate that transplantation was successful. This can also indicate that there is no rejection of the transplanted cells, tissues, and/or organs.

[0336] Further, transplanted cells, organs, and/or tissues can function at 100% of its normal intended operation. Transplanted cells, organs, and/or tissues can also function at least or at least about 50, 60, 65, 70, 75, 80, 85, 90, 95, 99, or 100% of its normal intended operation, e.g., from or from about 50 to 60; 60 to 70; 70 to 80; 80 to 90; 90 to 100%. In certain instances, the transplanted cells, organs, and/or tissues can function at greater 100% of its normal intended operation (when compared to a normal functioning non-transplanted cell, organ, or tissue as determined by the American Medical Association). For example, the transplanted cells, organs, and/or tissues can function at or at about 110, 120, 130, 140, 150, 175, 200% or greater of its normal intended operation, e.g., from or from about 100 to 125; 125 to 150; 150 to 175; 175 to 200%.

[0337] In certain instances, transplanted cells can be functional for at least or at least about 1 day. Transplanted cells can also functional for at least or at least about 7 day. Transplanted cells can be functional for at least or at least about 14 day. Transplanted cells can be functional for at least or at least about 21 day. Transplanted cells can be functional for at least or at least about 28 day. Transplanted cells can be functional for at least or at least about 60 days.

[0338] Another indication of successful transplantation can be the days a recipient does not require immunosuppressive therapy. For example, after treatment (e.g., transplantation) provided herein, a recipient can require no immunosuppressive therapy for at least or at least about 1, 5, 10, 100, 365, 500, 800, 1000, 2000, 4000 or more days. This can indicate that transplantation was successful. This can also indicate that there is no rejection of the transplanted cells, tissues, and/or organs.

[0339] In some cases, a recipient can require no immunosuppressive therapy for at least or at least about 1 day. A recipient can also require no immunosuppressive therapy for at least or at least about 7 days. A recipient can require no immunosuppressive therapy for at least or at least about 14 days. A recipient can require no immunosuppressive therapy for at least or at least about 21 days. A recipient can require no immunosuppressive therapy for at least or at least about 28 days. A recipient can require no immunosuppressive therapy for at least or at least about 60 days. Furthermore, a recipient can require no immunosuppressive therapy for at least or at least about 1, 2, 3, 4, 5, 6, 7, 8, 9, 10, 15, 20, 30, 40, or 50 years, e.g., for at least or at least about 1 to 2; 2 to 3; 3 to 4; 4 to 5; 1 to 5; 5 to 10; 10 to 15; 15 to 20; 20 to 25; 25 to 50 years.

[0340] Another indication of successful transplantation can be the days a recipient requires reduced immunosuppressive therapy. For example, after the treatment provided herein, a recipient can require reduced immunosuppressive therapy for at least or at least about 1, 5, 10, 50, 100, 200, 300, 365, 400, 500 days, e.g., for at least or at least about 1 to 30; 30 to 120; 120 to 365; 365 to 500 days. This can indicate that transplantation was successful. This can also indicate that there is no or minimal rejection of the transplanted cells, tissues, and/or organs.

[0341] For example, a recipient can require reduced immunosuppressive therapy for at least or at least about 1 day. A recipient can also require reduced immunosuppressive therapy for at least 7 days. A recipient can require reduced immunosuppressive therapy for at least or at least about 14 days. A recipient can require reduced immunosuppressive therapy for at least or at least about 21 days. A recipient can require reduced immunosuppressive therapy for at least or at least about 28 days. A recipient can require reduced immunosuppressive therapy for at least or at least about 60 days. Furthermore, a recipient can require reduced immunosuppressive therapy for at least or at least about 1, 2, 3, 4, 5, 6, 7, 8, 9, 10, 15, 20, 30, 40, or 50 years, e.g., for at least or at least about 1 to 2; 2 to 3; 3 to 4; 4 to 5; 1 to 5; 5 to 10; 10 to 15; 15 to 20; 20 to 25; 25 to 50 years.

[0342] “Reduced” and its grammatical equivalents as used herein can refer to less immunosuppressive therapy compared to a required immunosuppressive therapy when one or more wild-type cells is transplanted into a recipient.

### Immunosuppressive Therapy

[0343] Immunosuppressive therapy can comprise any treatment that suppresses the immune system. Immunosuppressive therapy can help to alleviate, minimize, or eliminate transplant rejection in a recipient. For example, immunosuppressive therapy can comprise immuno-suppressive drugs. Immunosuppressive drugs that can be used before, during and/or after transplant are any known to one of skill in the art and include, but are not limited to, MMF (mycophenolate mofetil (Cellcept)), ATG (anti-thymocyte globulin), anti-CD154 (CD4OL), anti-CD40 (2C10, ASKP1240, CCFZ533X2201), alemtuzumab (Campath), anti-CD20 (rituximab), anti-IL-6R antibody (tocilizumab, Actemra), anti-IL-6 antibody (sarilumab, olokizumab), CTLA4-Ig (Abatacept/Orencia), belatacept (LEA29Y), sirolimus (Rapimune), everolimus, tacrolimus (Prograf), daclizumab (Ze-napax), basiliximab (Simulect), infliximab (Remicade), cyclosporin, deoxyspergualin, soluble complement receptor 1, cobra venom factor, compstatin, anti C5 antibody (eculizumab/Soliris), methylprednisolone, FTY720, everolimus, leflunomide, anti-IL-2R-Ab, rapamycin, anti-CXCR3 antibody, anti-ICOS antibody, anti-OX40 antibody, and anti-CD122 antibody. Furthermore, one or more than one immunosuppressive agents/drugs can be used together or sequentially. One or more than one immunosuppressive agents/drugs can be used for induction therapy or for maintenance therapy. The same or different drugs can be used during induction and maintenance stages. In some cases, daclizumab (Zenapax) can be used for induction therapy and tacrolimus (Prograf) and sirolimus (Rapimune) can be used for maintenance therapy. Daclizumab (Zenapax) can also be used for induction therapy and low dose tacrolimus (Prograf) and low dose sirolimus (Rapimune) can be used for maintenance therapy. Immunosuppression can also be achieved using non-drug regimens including, but not limited to, whole body irradiation, thymic irradiation, and full and/or partial splenectomy. These techniques can also be used in combination with one or more immuno-suppressive drug.

[0344] Transgenic pancreatic islet cells can be transplanted using any means known in the art, including, but not limited to, introduction via a recipient organism's portal vein, liver subcapsular space, splenic subcapsular space, renal subcapsular space, omentum, gastric or intestinal submucosa, vascular segment of small intestine, venous sac, testis, brain, cornea or spleen. For example, a method of xenotransplantation can be to transplant pancreatic cells, e.g., porcine pancreatic cells, provided herein into a primate, e.g., a human, where islets are administered by intraportal infusion. A method of xenotransplantation can be provided to transplant pancreatic cells provided herein into a primate where islets are administered via the intraperitoneal space, renal subcapsule, renal capsule, omentum, or via pancreatic bed infusion. For example, transplanting can be subcapsular transplanting, intramuscular transplanting, or intraportal transplanting.

[0345] Both allotransplants and xenotransplants can sometimes be subject to recurrent autoimmunity. For example, with regards to islet cell transplantation, islet β cells can be attacked and destroyed after transplantation by autoreactive T cells, for example, by CD8+ autoreactive T cells, and autoreactive antibodies. When recipients are given tolerizing vaccines autoimmune recurrence can be prevented. For example, when tolerizing vaccines are engineered to also present autoantigens such as insulin B9-23 on the surface of apoptotic carrier cells or microparticles such as polystyrene particles, tolerance to autoantigens can be restored, and autoimmune recurrence can be prevented. For example, with respect to diabetes, the tolerizing vaccine as disclosed herein can prevent the onset of autoimmune Type 1 diabetes or prevent autoimmune recurrence in transplanted islet β cells.

[0346] The tolerizing vaccine can also be given to a recipient to prevent or treat diabetes (e.g., type 1, type 2, gestational, surgical, cystic fibrosis-related diabetes, or mitochondrial diabetes. In some cases, a disease can be hereditary diabetes or a type of hereditary diabetes).

[0347] Additionally, for both allotransplants and xenotransplants, disrupting genes such as NLRC5, TAP1, and B2M in the grafts can cause lack of functional expression of MEW class I on graft cells including on islet beta cells, thereby interfering with the posttransplant activation of autoreactive CD8+ T cells. Thus, this can protect the transplant, e.g., transplanted islet beta cells, from the cytolytic effector functions of autoreactive CD8+ T cells.

### Inducing the Tolerance of Transplant Grafts in a Recipient Using Tolerizing Vaccines

[0348] A tolerizing vaccine comprising ECDI-treated cells can be administered before, after, and/or during transplant of donor cells, organs, and/or tissues to induce donor-specific tolerance in a recipient. As an example show in FIG. 4, a pig islet is transplanted to a recipient (e.g., a human or a non-human animal) on day 0. Apoptotic cells (e.g., tolerizing vaccine) derived from the same donor pig can be first administered 7 days before islet transplant (day −7) for inducing tolerance to the xenograft (e.g., pig islet from the same donor). An additional tolerizing vaccine can be administered 1 day after islet transplant (day 1) to booster tolerance (FIG. 4). Furthermore, administration of a tolerizing vaccine can be accompanied by administration of transient immunosuppression (FIG. 4). In some cases, a tolerizing vaccine comprising ECDI-treated cells can be administered on or on about day −100, day −90, day −80, day −70, day −60, day −50, day −40, day −30, day −20, day −15, day −14, day −13, day −12, day −11, day −10, day −9, day −8, day −7, day −6, day −5, day −4, day −3, day −2 or day −1, relative to transplant of donor cells, organs, and/or tissues on day 0, e.g., on or on about day −100 to −50; −50 to −40; −40 to −30; −30 to −20; −20 to −10; −10 to −5; −7 to −1. For example, a tolerizing vaccine comprising ECDI-treated cells can be administered 7 days before (e.g., day −7) transplant of donor cells, organs, and/or tissues. In some cases, a tolerizing vaccine comprising ECDI-treated cells can be administered on the same day (e.g., day 0) as transplant of donor cells, organs, and/or tissues. In some cases, ECDI-treated cells can be administered on or on about day 100, day 90, day 80, day 70, day 60, day 50, day 40, day 30, day 20, day 15, day 14, day 13, day 12, day 11, day 10, day 9, day 8, day 7, day 6, day 5, day 4, day 3, day 2 or day 1, relative to transplant of donor cells, organs, and/or tissues on day 0. For example, a tolerizing vaccine comprising ECDI-treated cells can be administered on 1 day after (e.g., day 1) transplant of donor cells, organs, and/or tissues. In some cases, the tolerizing vaccine can be administered before and after the transplantation of donor cells, organs, and/or tissues.

[0349] Genetically modified cells, tolerizing vaccines and antibodies can be used together to suppress transplant rejection. FIG. 5 demonstrates an exemplary approach to preventing rejection and/or extending survival of a graft (e.g., a xenograft). The approach can integrate: i) genetic engineering of the graft donor; ii) genetic engineering of the vaccine donor, and iii) the administration of the genetically engineered tolerizing vaccine (apoptotic cells alone or with non-apoptotic cells), and the graft under the cover of the transient immunosuppression. A graft donor and a vaccine donor can have the same genotype. Alternatively, a graft donor and a vaccine donor can have different genotypes. In some cases, a graft donor can comprise reduced expression of NLRC5, C3, CXCL10, and GGTA1, and transgenes comprising polynucleotides encoding HLA-G (e.g., HLA-G1) or HLA-E. In some cases, a graft donor can comprise reduced expression of TAP1, C3, CXCL10, and GGTA1, and transgenes comprising polynucleotides encoding HLA-G (e.g., HLA-G1) or HLA-E. In some cases, a graft donor can comprise reduced expression of NLRC5 and TAP1, C3, CXCL10, and GGTA1, and transgenes comprising polynucleotides encoding HLA-G (e.g., HLA-G1) or HLA-E. A vaccine donor can have reduced expression of GGTA1, CMAH, B4GALNT2 and/or transgenes comprising polynucleotides encoding HLA-G (e.g., HLA-G1), CD47 (e.g., human CD47), PD-L1 (e.g., human PD-L1), and PD-L2 (e.g., human PD-L2). A vaccine donor can have reduced expression of GGTA1, CMAH, B4GALNT2 and/or transgenes comprising polynucleotides encoding HLA-E, CD47 (e.g., human CD47), PD-L1 (e.g., human PD-L1), and PD-L2 (e.g., human PD-L2). The vaccines in some instances can be given to a transplant recipient before (e.g., on day −7) and/or after (e.g., on day 1). Other immunosuppression reagents, e.g., one or more of anti-CD40 antibodies, anti-CD20 antibodies, rapamycin, compstatin, anti-IL-6R antibodies, and sTNFR, a nitrogen mustard alkylating agent (e.g., cyclophosphamide) can also be given to the subject before and/or after transplant.

[0350] In addition to the genetically modified cells, tissues, organs, tolerizing vaccines and anti-CD40 antibodies disclosed herein, one or more additional immunosuppression agents can also be administered to a subject receiving the genetically modified cells, tissues, organs, tolerizing vaccines and/or anti-CD40 antibodies. The additional immunosuppression agent can be administered to a subject, e.g., to enhance the tolerogenic efficacy of a tolerizing vaccine in the subject. The additional immunosuppression agent can include a B-cell depleting antibody, an mTOR inhibitor, a TNF-alpha inhibitor, a IL-6 inhibitor, a nitrogen mustard alkylating agent (e.g., cyclophosphamide), a complement C3 or C5 inhibitor, or any combination thereof.

[0351] The additional immunosuppression agent, e.g., can be a nitrogen mustard alkylating agent. For example, the additional immunosuppression agent can be cyclophosphamide.

[0352] The additional immunosuppression agent can be administered before, after, and/or during the administration of a tolerizing vaccine. In some cases, the additional immunosuppression agent can be administered between day −100 and day 0, e.g., on day −90, day −80, day −70, day −60, day −50, day −40, day −30, day −20, day −15, day −14, day −13, day −12, day −11, day −10, day −9, day −8, day −7, day −6, day −5, day −4, day −3, day −2 or day −1, relative to the administration of a tolerizing vaccine. In some cases, the additional immunosuppression agent can be administered on or on about day −100 to −50; −50 to −40; −40 to −30; −30 to −20; −20 to −10; −10 to −5; −7 to −1, relative to the administration of a tolerizing vaccine. In some cases, the additional immunosuppression agent can be administered between day 0 and day 100, e.g., on day 100, day 90, day 80, day 70, day 60, day 50, day 40, day 30, day 20, day 15, day 14, day 13, day 12, day 11, day 10, day 9, day 8, day 7, day 6, day 5, day 4, day 3, day 2 or day 1 relative to the administration of a tolerizing vaccine. For example, the immunosuppression agent can be administered on or on about day 100 to 50; 50 to 40; 40 to 30; 30 to 20; 20 to 10; 10 to 5; 7 to 1, relative to the administration of a tolerizing vaccine. In some cases, the additional immunosuppression agent can be administered on the day when a tolerizing vaccine is administered. In other cases, the additional immunosuppression can be administered before and after the administration of the tolerizing vaccine. For example, cyclophosphamide can be administered on or on about day 3 after the administration of a tolerizing vaccine.

[0353] A tolerogenic efficacy regulator (e.g., cyclophosphamide) can be administered at dose from or from about 5 to 100 mg/kg/day. The unit “mg/kg/day” can refer to the number of milligrams of the tolerogenic efficacy regulator given per kilogram of the subject's body weight per day. In some cases, a tolerogenic efficacy regulator (e.g., cyclophosphamide) can be administered at a dose of from or from about 20 mg/kg/day to 100 mg/kg/day; 30 mg/kg/day to 90 mg/kg/day; 40 mg/kg/day to 80 mg/kg/day; 50 mg/kg/day to 70 mg/kg/day; 50 mg/kg/day to 60 mg/kg/day; or 40 mg/kg/day to 60 mg/kg/day.

[0354] Cells (e.g., splenocytes) can be treated with ECDI in the presence of suitable antigen(s) and/or epitope(s) (e.g., CD4). ECDI-treatment can result in coupling of antigen(s) and/or epitope(s) to ECDI-treated cells. Other conjugates such as hexamethylene diisocyanate, propyleneglycol di-glycidylether which contain 2 epoxy residues, and epichlorohydrin can also be used to treat cells and couple antigens(s) and/or epitope(s) to make cells for tolerizing vaccines.

[0355] Antigen-coupled and/or epitope-coupled cells (e.g., ECDI-induced coupling) can be administered before, during, and/or after administration of donor transplant cells, organs, and/or tissues to induce tolerance for the cells, organs, and/or tissues in a recipient (e.g., a human or a non-human animal). In some cases, antigen-coupled and/or epitope-coupled cells can be administered on day −100, day −90, day −80, day −70, day −60, day −50, day −40, day −30, day −20, day −15, day −14, day −13, day −12, day −11, day −10, day −9, day −8, day −7, day −6, day −5, day −4, day −3, day −2 or day −1, relative to transplant of donor cells, organs, and/or tissues on day 0. In some cases, the antigen-coupled and/or epitope-coupled cells can be administered on or about on day −100 to −50; −50 to −40; −40 to −30; −30 to −20; −20 to −10; −10 to −5; −7 to −1, relative to transplant of donor cells, organs, and/or tissues on day 0. For example, antigen-coupled and/or epitope-coupled cells can be administered 7 days before (e.g., day −7) transplant of donor cells, organs, and/or tissues. In some cases, antigen-coupled and/or epitope-coupled cells can be administered on the same day (e.g., day 0) as the transplant of donor cells, organs, and/or tissues. In some cases, antigen-coupled and/or epitope-coupled cells can be administered on day 100, day 90, day 80, day 70, day 60, day 50, day 40, day 30, day 20, day 15, day 14, day 13, day 12, day 11, day 10, day 9, day 8, day 7, day 6, day 5, day 4, day 3, day 2 or day 1, relative to transplant of donor cells, organs, and/or tissues on day 0. For example, the antigen-coupled and/or epitope-coupled cells can be administered on or on about day 100 to 50; 50 to 40; 40 to 30; 30 to 20; 20 to 10; 10 to 5; 7 to 1, relative to transplant of donor cells, organs, and/or tissues on day 0. For example, antigen-coupled and/or epitope-coupled cells can be administered on 1 day after (e.g., day 1) transplant of donor cells, organs, and/or tissues.

[0356] ECDI-treated cells, antigen-coupled cells, and/or epitope-coupled cells can be administered to a recipient prior to transplantation of donor cells, organs, and/or tissues to a recipient. ECDI-treated cells, antigen-coupled cells, and/or epitope-coupled cells can be co-administered to a recipient prior to transplantation of donor cells, organs, and/or tissues to a recipient. ECDI-treated cells, antigen-coupled cells, and/or epitope-coupled cells can be administered to a recipient following transplantation of donor cells, organs, and/or tissues to a recipient. Administration of ECDI-treated cells, antigen-coupled cells, and/or epitope-coupled cells to a transplant recipient before, during, and/or after transplantation can result in increased tolerance of transplanted cells, organs, and/or tissues. For example, ECDI-treated cells, antigen-coupled cells, and/or epitope-coupled cells can increase initial tolerance, long-term tolerance, and/or total acceptance of transplanted cells, organs, and/or tissues. In some cases, administering ECDI-treated cells (e.g. epitope-coupled cells) to a transplant recipient can result in tolerance of transplanted materials without additional immunosuppression or anti-rejection therapies.

[0357] Tolerizing vaccines can reduce the dose or duration of immunosuppression required to prevent rejection of cells, organs, and/or tissues. Tolerizing vaccines can reduce the dose of immunosuppression required by at least or at least about 5%. For example, Tolerizing vaccines reduce the dose of immunosuppression required by at least or at least about 5%, 10%, 20%, 30%, 40%, 50%, 60%, 65%, 70%, 75%, 80%, 85%, 90%, 95%, or 100%, e.g., by at least or at least about 5 to 25; 25 to 50; 50 to 75; 75 to 85; 85 to 90; 90 to 95; 95 to 100%. In some cases, a transplant recipient can require no immunosuppression after administration of a tolerizing vaccine. The term “reduce” and its grammatical equivalents as used herein can refer to using less immunosuppression compared to a required dose of immunosuppression when one or more wild-type cells, organs, and/or tissues is transplanted into a recipient (e.g., a human or a non-human animal). The term “reduce” can also refer to using less immunosuppressive drug(s) or agent(s) compared to a required dose of immunosuppression when one or more wild-type cells, organs, and/or tissues is transplanted into a recipient (e.g., a human or a non-human animal).

[0358] A recipient (e.g., a human or a non-human animal) can require a reduced dose of immunosuppression for at least or at least about 1, 5, 10, 20, 30, 40, 50, 60, 70, 80, 90, or 100 days after transplantation, e.g., for at least or at least about 1 to 5; 5 to 10; 10 to 20; 20 to 30; 30 to 60; 60 to 100 days. A recipient (e.g., a human or a non-human animal) can require a reduced dose of immunosuppression for at least or at least about 1, 2, 3, 4, 5, 6, 7, 8, 9, 10, 11, or 12 months after transplantation, e.g., for at least or at least about 1 to 2; 2 to 3; 3 to 6; 6 to 9; 9 to 12 months after transplantation. A recipient (e.g., a human or a non-human animal) can require a reduced dose of immunosuppression for at least or at least about 1, 2, 3, 4, 5, 6, 7, 8, 9, 10, 15, 20, 25, or 30 years after transplantation, e.g. for at least or at least about 1 to 2; 2 to 3; 3 to 4; 4 to 5; 1 to 5; 5 to 10; 10 to 15; 15 to 20; 20 to 25; 25 to 30 years after transplantation. In some cases, a recipient (e.g., a human or a non-human animal) can require a reduced dose of immunosuppression for up to the lifetime of the recipient.

[0359] A recipient (e.g., a human or a non-human animal) can require no immunosuppression for at least or at least about 1, 5, 10, 20, 30, 40, 50, 60, 70, 80, 90, or 100 days after transplantation, e.g., for at least or at least about 1 to 5; 5 to 10; 10 to 20; 20 to 30; 30 to 60; 60 to 100 days. A recipient (e.g., a human or a non-human animal) can require a reduced dose of immunosuppression for at least or at least about 1, 2, 3, 4, 5, 6, 7, 8, 9, 10, 11, or 12 months after transplantation e.g., for at least or at least about 1 to 2; 2 to 3; 3 to 6; 6 to 9; 9 to 12 months after transplantation. A recipient (e.g., a human or a non-human animal) can require a reduced dose of immunosuppression for at least or at least about 1, 2, 3, 4, 5, 6, 7, 8, 9, 10, 15, 20, 25, or 30 years after transplantation, e.g. for at least or at least about 1 to 2; 2 to 3; 3 to 4; 4 to 5; 1 to 5; 5 to 10; 10 to 15; 15 to 20; 20 to 25; 25 to 30 years after transplantation. In some cases, a recipient (e.g., a human or a non-human animal) can require no immunosuppression for up to the lifetime of the recipient.

[0360] Immunosuppression described herein can refer to the immunosuppression administered immediately before, after, and/or during transplantation. Immunosuppression described herein can also refer to the maintenance immunosuppression administered at least or at least about 1, 2, 3, 4, 5, 6, 7, 8, 9, 10, 20, 30, 40, 50, 60, 70, 80, 90, or 100 days (e.g., for at least or at least about 1 to 5; 5 to 10; 10 to 20; 20 to 30; 30 to 60; 60 to 100 days) or 1, 2, 3, 4, 5, 6, 7, 8, 9, 10, 15, 20, 25, or 30 years (e.g., for at least or at least about 1 to 2; 2 to 3; 3 to 4; 4 to 5; 1 to 5; 5 to 10; 10 to 15; 15 to 20; 20 to 25; 25 to 30 years) after transplantation. Tolerizing vaccines can increase survival of cells, organs, and/or tissues without need for maintenance immunosuppression.

[0361] Immunosuppression can be used in immunosuppressive therapy to suppress transplant rejection in a recipient. Immunosuppressive therapy can comprise any treatment that suppresses transplant rejection in a recipient (e.g., a human or a non-human animal). Immunosuppressive therapy can comprise administering immuno-suppressive drugs. Immunosuppressive drugs that can be used before, during, and/or after transplant include, but are not limited to, MMF (mycophenolate mofetil (Cellcept)), ATG (anti-thymocyte globulin), anti-CD154 (CD4OL), alemtuzumab (Campath), anti-CD20 (rituximab), anti-IL-6R antibody (tocilizumab, Actemra), anti-IL-6 antibody (sarilumab, olokizumab), CTLA4-Ig (Abatacept/Orencia), belatacept (LEA29Y), sirolimus (Rapimune), tacrolimus (Prograf), daclizumab (Ze-napax), basiliximab (Simulect), infliximab (Remicade), cyclosporin, deoxyspergualin, soluble complement receptor 1, cobra venom factor, compstatin, anti C5 antibody (eculizumab/Soliris), methylprednisolone, FTY720, everolimus, anti-CD154-Ab, leflunomide, anti-IL-2R-Ab, rapamycin, anti-CXCR3 antibody, anti-ICOS antibody, anti-OX40 antibody, and anti-CD122 antibody, and human anti-CD154 monoclonal antibody. One or more than one immunosuppressive agents/drugs can be used together or sequentially. One or more than one immunosuppressive agents/drugs can be used for induction therapy or for maintenance therapy. The same or different drugs can be used during induction and maintenance stages. For example, daclizumab (Zenapax) is used for induction therapy and tacrolimus (Prograf) and sirolimus (Rapimune) is used for maintenance therapy. In another example, daclizumab (Zenapax) is used for induction therapy and low dose tacrolimus (Prograf) and low dose sirolimus (Rapimune) is used for maintenance therapy. Immunosuppression can also be achieved using non-drug regimens including, but not limited to, whole body irradiation, thymic irradiation, and full and/or partial splenectomy. These techniques can also be used in combination with one or more immuno-suppressive drug.

### Antibody Treatment

[0362] Both allografts and xenografts that escape fulminant, hyperacute, and/or acute vascular rejection are subjected to T cell mediated rejection. CD4⁺ and CD8⁺ T lymphocytes contribute to rejection. These T cells can be activated via the direct pathway of immune recognition involving presentation by donor antigen presenting cells to T cells or via the indirect pathway involving presentation of internalized soluble donor antigen by host antigen presenting cells. CD8⁺ T cells are main mediators of rejection. B cells promote proliferation of activated anti-donor CD4⁺ T cells, survival of anti-donor CD8⁺ T cells, and T cell memory generation by mechanisms such as antigen presentation, cytokine production, and co-stimulation. The compositions and methods disclosed herein can be used to reduce a recipient's direct immune responses, indirect immune responses, or both to a cell, tissue or organ transplanted from a donor. The methods of treatment as described herein can comprise providing ECDI-treated cells (e.g., tolerizing vaccine) and one or more biological or chemical substances to a human. For example, ECDI-treated cells can be porcine cells, e.g., porcine splenocytes.

[0363] One or more biological or chemical substances can be an antibody. An antibody can be an anti-CD40 or anti-IL-6R. An anti-CD40 antibody can be an anti-CD40 Ab 2C10 antibody, an anti-CD40 mAb ASKP1240 (4D11) (e.g., as described in Watanabe et al., “ASKP1240, a fully human anti-CD40 monoclonal antibody, prolongs pancreatic islet allograft survival in nonhuman primates,” Am J Transplant. 13(8):1976-88 (2013), or an anti-CD40 mAb CFZ533 (as described in Corodoba et al., “A Novel, Blocking, Fc-Silent Anti-CD40 Monoclonal Antibody Prolongs Nonhuman Primate Renal AllograftSurvival in the Absence of B Cell Depletion,” Am J Transplant, 15(11):2825-36 (2015).

[0364] Methods described herein for immunotolerizing a recipient (e.g., a human or a non-human animal) for transplantation (e.g., xenotransplantation) can comprise providing to a recipient (e.g., a human or a non-human animal) two or more biological or chemical substances selected from a group consisting of: ECDI-treated cells, B cell depleting antibodies, antagonistic anti-CD40 antibodies, mTOR inhibitors, and TNF-alpha inhibitors, and IL-6 inhibitors, or any combination thereof. Methods herein for prolonging transplantation survival in a recipient (e.g., a human or a non-human animal) can comprise administering to the recipient (e.g., a human or a non-human animal) two or more biological substances selected from the group consisting of ECDI-treated cells, anti-CD40 Ab 2C10 antibody, sTNFR, anti-IL-6R antibody, or any combination thereof. For example, the methods can comprise providing to a recipient (e.g., a human or a non-human animal) ECDI-treated cells, where the ECDI-treated cells are disclosed herein. The methods can comprise providing to a recipient (e.g., a human or a non-human animal) B cell depleting antibodies, for example, rituximab. The methods can comprise providing to a recipient (e.g., a human or a non-human animal) antagonistic anti-CD40 antibodies, for example, humanized 2C10. The methods can comprise providing to a recipient (e.g., a human or a non-human animal) mTOR inhibitors, for example, rapamycin. The methods can comprise providing to a recipient (e.g., a human or a non-human animal) TNF-alpha inhibitors, for example, sTNFR. sTNFR can also be tocilizumab or etanercept. The methods can comprise providing to a recipient (e.g., a human or a non-human animal) an IL-6 inhibitor, for example, an anti-IL-6R antibody. In some cases, the methods can comprise providing to a recipient (e.g., a human or a non-human animal) an antibody (e.g., a monoclonal antibody) targeting a non-redundant epitope on antigen presenting cells (APC). In some cases, the methods can comprise administering pharmaceutical agents that inhibit T cell activation, B cell activation, dendritic cell activation, or any combination thereof.

[0365] The present disclosure can also provide a kit comprising two or more of the following: a splenocyte; anti-CD40 Ab 2C10 antibody; sTNFR; and anti-IL-6R antibody. For example, a kit can comprise a splenocyte and anti-CD40 Ab 2C10 antibody. A kit can comprise a splenocyte and sTNFR. A kit can comprise a splenocyte and anti-IL-6R antibody. A kit can comprise an anti-CD40 Ab 2C10 antibody and sTNFR. A kit can comprise an anti-CD40 Ab 2C10 antibody and anti-IL-6R antibody. A kit can comprise a sTNFR and anti-IL-6R antibody. A kit can comprise a splenocyte, anti-CD40 Ab 2C10 antibody and sTNFR. A kit can comprise a splenocyte, anti-CD40 Ab 2C10 antibody and anti-IL-6R antibody. A kit can comprise a splenocyte, sTNFR and anti-IL-6R antibody. A kit can comprise anti-CD40 Ab 2C10 antibody, sTNFR and anti-IL-6R antibody. A kit can comprise a splenocyte; anti-CD40 Ab 2C10 antibody; sTNFR; and anti-IL-6R antibody. A kit can further comprise a reagent for ECDI fixation.

[0366] The methods herein can comprise ECDI-treated cells, such as ECDI-treated splenocytes. In some cases, the methods can comprise providing to a recipient (e.g., a human or a non-human animal) ECDI-treated splenocytes and anti-CD40 Ab 2C10 antibody. In some cases, the methods can comprise providing to a recipient (e.g., a human or a non-human animal) ECDI-treated splenocytes and sTNFR. In some cases, the methods can comprise providing to a recipient (e.g., a human or a non-human animal) ECDI-treated splenocytes and anti-IL-6R antibody. In some cases, the methods can comprise providing to a recipient (e.g., a human or a non-human animal) anti-CD40 Ab 2C10 antibody and sTNFR. In some cases, the methods can comprise providing to a recipient (e.g., a human or a non-human animal) anti-CD40 Ab 2C10 antibody and anti-IL-6R antibody. In some cases, the methods can comprise providing to a recipient (e.g., a human or a non-human animal) ECDI-treated splenocytes, anti-CD40 Ab 2C10 antibody, and sTNFR. In some cases, the methods can comprise providing to a recipient (e.g., a human or a non-human animal) ECDI-treated splenocytes, anti-CD40 Ab 2C10 antibody, and anti-IL-6R. In some cases, the methods can comprise providing to a recipient (e.g., a human or a non-human animal) ECDI-treated splenocytes, sTNFR, and anti-IL-6R antibody. In some cases, the methods can comprise providing to a recipient (e.g., a human or a non-human animal) ECDI-treated splenocytes, anti-CD40 Ab 2C10 antibody, sTNFR, and anti-IL-6R antibody. In some cases, the methods can comprise providing to a recipient (e.g., a human or a non-human animal) ECDI-treated splenocytes, and an antibody (e.g., a monoclonal antibody) targeting a non-redundant epitope on antigen presenting cells (APC).

[0367] A donor (e.g., a donor for a transplant graft and/or a cell in a tolerizing vaccine) can be a mammal. A donor of allografts can be an unmodified human cell, tissue, and/or organ, including but not limited to pluripotent stem cells. A donor of xenografts can be any cell, tissue, and/or organ from a non-human animal, such as a mammal. In some cases, the mammal can be a pig.

[0368] The methods herein can further comprise diagnosing a recipient (e.g., a human or a non-human animal) with a disease. For example, a disease is diabetes, including but not limited to, type 1, type 2, gestational, surgical, cystic fibrosis-related diabetes, or mitochondrial diabetes. In some cases, a disease can be hereditary diabetes or a type of hereditary diabetes.

[0369] The methods herein can comprise administering ECDI-treated cells before, after, and/or during transplant of donor cells, organs, and/or tissues to induce donor-specific tolerance in a recipient. In some cases, ECDI-treated cells can be administered on or on about day −100, day −90, day −80, day −70, day −60, day −50, day −40, day −30, day −20, day −15, day −14, day −13, day −12, day −11, day −10, day −9, day −8, day −7, day −6, day −5, day −4, day −3, day −2 or day −1, relative to transplant of donor cells, organs, and/or tissues on day 0. In some cases, the antigen-coupled and/or epitope-coupled cells can be administered on or about on day −100 to −50; −50 to −40; −40 to −30; −30 to −20; −20 to −10; −10 to −5; −7 to −1, relative to transplant of donor cells, organs, and/or tissues on day 0. For example, ECDI-treated cells can be administered 7 days before (e.g., day −7) transplant of donor cells, organs, and/or tissues. In some cases, ECDI-treated cells can be administered on the same day (e.g., day 0) as transplant of donor cells, organs, and/or tissues. In some cases, ECDI-treated cells can be administered on or on about day 100, day 90, day 80, day 70, day 60, day 50, day 40, day 30, day 20, day 15, day 14, day 13, day 12, day 11, day 10, day 9, day 8, day 7, day 6, day 5, day 4, day 3, day 2 or day 1, relative to transplant of donor cells, organs, and/or tissues on day 0. For example, the antigen-coupled and/or epitope-coupled cells can be administered on or on about day 100 to 50; 50 to 40; 40 to 30; 30 to 20; 20 to 10; 10 to 5; 7 to 1, relative to transplant of donor cells, organs, and/or tissues on day 0. For example, ECDI-treated cells can be administered on 1 day after (e.g., day 1) transplant of donor cells, organs, and/or tissues.

[0370] The methods herein can comprise administering at least or at least about 0.25×10⁹ ECDI-treated cells (e.g., donor splenocytes) per kg recipient body weight. For example, at least or at least about 1×10⁷ 1×10⁸, 0.25×10⁹ 0.50×10⁹ 0.75×10⁹ 1.00×10⁹ 1.25×10⁹ 1.50×10⁹ 1.75×10⁹ or 2×10⁹ ECDI-treated cells (e.g., donor splenocytes) per kg recipient body weight ECDI-treated cells can be administered. ECDI-treated cells can also be splenic B cells. The methods herein can comprise administering from or from about 1×10⁸ to 2×10⁹, e.g., 1×10⁸ to 2×10⁸, 1×10⁸ to 3×10⁸, 1×10⁸ to 4×10⁸, 1×10⁸ to 5×10⁸, 1×10⁸ to 1×10⁹, ECDI-treated cells (e.g., donor splenocytes) per kg recipient body weight.

[0371] Donor splenocytes can be freshly isolated. Alternatively, ECDI-treated cells can be ex-vivo expanded. In some cases, donor splenocytes comprise at least or at least about 10%, e.g., 25%, CD21 positive SLA Class II positive B cells. For example, donor splenocytes comprise at least or at least about 10%, 15%, 20%, 25%, 30%, 35%, 40%, 45%, 50%, 55% or 60% CD21 positive SLA Class II positive B cells, e.g., at least or at least about 10 to 20; 20 to 30; 30 to 40; or 40 to 50%. In some cases, splenic B cells comprise at least or at least about 60%, e.g., 90%, CD21 positive SLA Class II positive B cells. For example, splenic B cells comprise at least or at least about 60%, 65%, 70%, 75%, 80%, 85%, 90% or 95% CD21 positive SLA Class II positive B cells e.g., at least or at least about 60 to 70; 70 to 80; 80 to 90; or 90 to 95%. In some cases, donor splenocytes comprise from or from about 50% to 100%, e.g., from or from about 60% to 100% or 80% to 100%, CD21 positive SLA Class II positive B cells.

[0372] ECDI-treated cells can be given intravenously. ECDI-treated cells are infused intravenously. In some cases, ECDI-treated cells can be given intravenously in a volume of at least or at least about 1 ml, 2 ml, 3 ml, 4 ml, 5 ml, 10 ml, 20 ml, 30 ml, 40 ml or 50 ml per kg recipient body weight, e.g., at least or at least about 1 to 2; 2 to 3; 3 to 4; 4 to 5; 1 to 5; 5 to 10; 10 to 20; 20 to 30; 30 to 40; or 40 to 50. For example, ECDI-treated cells are given intravenously in a volume of 7 ml per kg recipient body weight.

[0373] The methods herein can further comprise treating a disease by transplanting one or more donor cells to an immunotolerized recipient (e.g., a human or a non-human animal).

[0374] The methods can comprise providing cells (e.g., ECDI-treated cells) one or more disrupted genes selected from NOD-like receptor family CARD domain containing 5 (NLRC5), Transporter associated with antigen processing 1 (TAP1), GGTA1, B4GALNT2, CMAH, C-X-C motif chemokine 10 (CXCL10), MHC class I polypeptide-related sequence A (MICA), MHC class I polypeptide-related sequence B (MICB), or class II major histocompatibility complex transactivator (CIITA). ECDI-treated cells can be derived from the same donor. Furthermore, ECDI-treated cells can further comprise one or more transgenes selected from ICP47, CD46, CD55, CD59, or any combination thereof. In some cases, donor cells can be islet cells. In some cases, the one or more disrupted gene does not include GGTA1.

[0375] Antagonistic anti-CD40 monoclonal antibody 2C10 can be given in combination with other immunotherapy (sTNFR, anti-IL-6R, mTOR inhibitor, with and without anti-CD20 monoclonal antibodies, and with or without CTLA4-Ig) and with or without intravenous infusion of donor apoptotic cells. This treatment can facilitate remarkable and unprecedented islet allograft and pig islet xenograft survival in primates, e.g., monkeys. For example, most remarkable is the maintenance of excellent blood glucose control in transplanted monkeys despite discontinuation of exogenous insulin and all immunosuppression on or on about day 21 posttransplant. Examples include the maintenance of excellent islet allograft function in 3 of 4 monkeys for at least or at least about 200 days (2 without and 1 with administration of donor apoptotic cells) and the maintenance of excellent islet xenograft function in 1 of 1 monkeys for at least or at least about 100 days (with administration of donor apoptotic cells).

[0376] Other methods of use can include i) transient or infrequent use of anti-CD40 monoclonal antibody 2C10 or similar antibodies for prevention of rejection of genetically modified grafts, ii) transient or infrequent use of anti-CD40 monoclonal antibody 2C10 or similar antibodies in transplantation in conjunction with other immunotherapy targeting inflammation (e.g., complement inhibitors and cytokine and chemokine inhibitors such as the IL-8 inhibitor reparaxin), and the use of anti-CD40 monoclonal antibody 2C10 or similar antibodies for prevention of stem cell-derived cellular grafts such as functional human islet beta cells.

[0377] The methods herein can comprise administering one or more dose of anti-CD40 antibody to a recipient before, after, and/or during transplant of donor cells, organs, and/or tissues to induce donor-specific tolerance in a recipient. In some cases, a first dose of anti-CD40 antibody can be given on or on about day −100, day −90, day −80, day −70, day −60, day −50, day −40, day −30, day −20, day −15, day −14, day −13, day −12, day −11, day −10, day −9, day −8, day −7, day −6, day −5, day −4, day −3, day −2 or day −1, relative to transplant of donor cells, organs, and/or tissues on day 0. In some cases, a first dose of anti-CD40 antibody can be given on or on about day −100 to −50; −50 to −40; −40 to −30; −30 to −20; −20 to −10; −10 to −5; −7 to −1, relative to transplant of donor cells, organs, and/or tissues on day 0. For example, a first dose of anti-CD40 antibody can be given 8 days (e.g., day −8) before transplant of donor cells, organs, and/or tissues.

[0378] Different doses of anti-CD40 antibody can be given to a recipient before, after, and/or during transplant of donor cells, organs, and/or tissues to induce donor-specific tolerance in a recipient. In some cases, a first dose of anti-CD40 antibody can comprise at least or at least about 1 mg, 5 mg, 10 mg, 20 mg, 30 mg, 40 mg, 50 mg, 60 mg, 70 mg, 80 mg, 90 mg, 100 mg, or 200 mg of the anti-CD40 antibody per kg recipient body weight. In certain cases, a first dose of anti-CD40 antibody can comprise at least or at least about 30 mg, 40 mg, 50 mg, 60 mg, 70 mg of the anti-CD40 antibody per kg recipient body weight. In some cases, a first dose of anti-CD40 antibody can comprise from or from about 1 mg to 200 mg, e.g., from or from about 20 mg to 100 mg; 30 mg to 80 mg; 30 mg to 70 mg; 40 mg to 70 mg; 40 mg to 60 mg; 50 mg to 70 mg; or 60 mg to 80 mg of the anti-CD40 antibody per kg recipient body weight.

[0379] FIG. 6 demonstrates an exemplary protocol for transplant rejection prophylaxis in pig-to-cynomolgus monkey islet xenotransplantation. For a cynomolgus monkey transplanted with 25,000 islet equivalents/kg on day 0 (the day of transplantion), the protocol for transplant rejection prophylaxis can include: administering ECDI-fixed, apoptotic donor splenocytes on days −7 and 1, administering an α-CD40 (e.g., 2C10) 50 mg/kg on days −8, −1, 7, 14, administering an α-CD20 antibody (e.g., rituximab) 20 mg/kg on days −10, −3, 5, and 12, administering rapamycin (target trough 15-25 ng/mL), administering sTNFR (1 mg/kg on days −7 and 0, 0.5 mg/kg on days 3, 7, 10, 14, and 21), and administering an α-IL-6R antibody on days −7, 0, 7, 14, and 21 to the cynomolgus monkey.

### EXAMPLES

### Example 1

### Generating Plasmids Expressing Guide RNA for Disrupting GGTA1, CMAH, NLRC5, B4GALNT2, and/or C3 Genes in Pigs

[0380] Genetically modified pigs will provide transplant grafts that induce low or no immuno-rejection in a recipient, and/or cells as tolerizing vaccines that enhance immuno-tolerization in the recipient. Such pigs will have reduced expression of any genes that regulate MHC molecules (e.g., MHC I molecules and/or MHC II molecules) compared to a non-genetically modified counterpart animal. Reducing expression of such genes will result in reduced expression and/or function of WIC molecules. These genes will be one or more of the following: components of an MHC I-specific enhanceosome, transporters of a MHC I-binding peptide, natural killer group 2D ligands, CXCR 3 ligands, C3, and CIITA. Additionally or alternatively, such pigs will comprise reduced protein expression of an endogenous gene that is not expressed in human (e.g., CMAH, GGTA1 and/or B4GALNT2). For example, the pigs will comprise reduced protein expression of one or more of the following: NLRC5, TAP1, C3, CXCL10, MICA, MICB, CIITA, CMAH, GGTA1 and/or B4GALNT2. In some cases, pigs will comprise reduced protein expression of NLRC5, C3, CXCL10, CMAH, GGTA1 and/or B4GALNT2.

[0381] This example shows exemplary methods for generating plasmids for disrupting GGTA1, CMAH, NLRC5, B4GALNT2, and/or C3 genes in pigs using the CRISPR/cas9 system. The plasmids were generated using the px330 vector, which simultaneously expressed a Cas9 DNA endonuclease and a guide RNA.

[0382] The px330-U6-Chimeric_BB-CBh-hSpCas9 (#42230) plasmid was obtained from Addgene in a bacterial stab culture format. The stab culture was streaked onto a pre-warmed LB agar with ampicillin plate and incubated at 37° C. overnight. The next day, a single colony was selected and inoculated in a liquid LB overnight culture with ampicillin (5 mL for mini-prep, or 80-100 mL for maxi-prep). Mini-prep was performed using Qiagen kits according to manufacturer's instructions. Plasmid was eluted in nuclease free water and stocks were stored at −20° C. The oligonucleotides designed for targeting GGTA1, CMAH, NLRC5, C3, and B4GALNT2 are shown in Table 6. The oligonucleotides were synthesized by IDT. FIGS. 7A-7E, 8A-8E, 9A-9E, 10A-10E, and 11A-11E, show the cloning strategies for cloning plasmids targeting GGTA1 (i.e., px330/Gal2-1) (FIGS. 7A-7E), CMAH (i.e., px330/CM1F) (FIGS. 8A-8E), NLRC5 (i.e., px330/NL1_First) (FIGS. 9A-9E), C3 (i.e., px330/C3-5) (FIGS. 10A-10E), and B4GALNT2 (i.e., px330/B41_second) (FIGS. 11A-11E). The constructed px330 plasmids were validated by sequencing using sequencing primers shown in Table 7. Oligonucleotides were re-suspended at 100 μM with nuclease free water and stored in the −20° C. freezer.

[0383] Vector digestion: The px330 vectors were digested in a reaction solution containing 5 μg px330 stock, 5 μL 10× FastDigest Reaction Buffer, 35 μL nuclease free water, and 5 μL FastDigest BbsI enzyme (Cutsite: GAAGAC). The reaction solution was incubated at 37° C. for 15 minutes, the heat inactivated at 65° C. for 15 minutes. To desphosphorylate the vector, 0.2 μL (2 U; 1 U/l pmol DNA ends) CIP was added and the resulting mixture was incubated at 37° C. for 60 minutes. The linearized plasmid was purified using Qiagen PCR Cleanup kit, and eluted with nuclease free water and stored at −20° C. until use.

[0384] Oligonucleotides Annealing and phosphorylation: a solution was made by mixing 1 μL 100 uM Forward oligonucleotide, 1 μL 100 uM Reverse oligonucleotide, 1 μL 10×T4 Ligase Buffer, 6 μL nuclease free water, 1 μL Polynucleotide Kinase (PNK). The resulting solution was incubated on a thermal cycler running the following program: 37° C. for 30 min, 95° C. for 5 min, ramp down to 25° C. at 0.1° C./second.

[0385] Ligation Reaction: a solution was made by mixing diluted annealed oligonucleotides 1:250 with nuclease free water, 2 μL diluted annealed oligonucleotides, 100 ng linearized/dephosphorylated px330 vector, 5 μL 10×T4 Ligase Buffer, nuclease free water to bring to 50 μL final volume, and 2.5 μL T4 DNA Ligase. The solution was incubated at room temp for 4 hours, then heat inactivated at 65° C. for 10 minutes.

[0386] Transformation: TOP10 E. coli vials were thawed from −80° C. freezer on ice for 15 minutes prior to transformation. 2 μL of the ligation reaction product was added to the cells and mixed by gently flicking the tubes. The tubes were incubated on ice for 5 minutes, heat shocked in 42° C. water bath for 30 seconds, and placed back on ice for additional 2 minutes after heat shock. 50 μL of transformed cells were plated onto an LB agar with ampicillin plate and spread with pipette tip. The plates were incubated at 37° C. overnight.

[0387] Colony PCR screening for correctly inserted oligonucleotides: 3× colonies were selected from the plate and labeled 1-3 on bottom of plate. Master mix for PCR reaction was prepared by mixing 15 μL 10× Standard Taq Reaction Buffer, 3 μL 10 mM dNTP mix, 0.5 μL 100 uM px330-F1 primer (SEQ ID No. 125 in Table 7), 0.5 μL 100 uM px330-R1 primer (SEQ ID No. 126 in Table 7), 130 μL nuclease free water, and 1 μL Standard Taq Polymerase. Master mix was vortexed briefly, then aliquotted 50 μL to 3×PCR tubes labeled 1-3. A pipette tip was dabbed into colony #1 on the agar plate and then pipetted up and down in PCR tube #1. Repeated for each colony being screened using a fresh tip for each colony. Tubes were placed in thermal cycler to run the following program: 95° C. for 5 min, 95° C. for 30 seconds, 52° C. for 30 seconds, 68° C. for 30 seconds, cycle step 2-4 for 30 cycles, 68° C. for 5 min, hold at 4° C. until use. PCR Cleanup was performed using Qiagen PCR Cleanup Kit and followed manufacturer's protocol. The product was eluted in nuclease free water.

[0388] Preparing samples for sequencing: a solution was made by mixing 120 ng PCR product, 6.4 pmols px330-F1 primer (1 μL of 6.4 μM stock), and nuclease free water that brought the final volume to 12 μL. After the sequence data was obtained, correct sequence inserts were identified. Glycerol stocks of colonies with correct inserts were prepared. On the LB agar plate labeled during colony PCR with #1-3, the correctly inserted colonies were inoculated in 5 mL LB medium with ampicillin by dabbing with a pipette tip and ejecting into the tube of medium. Liquid culture was grown out until an OD was reached between 1.0 and 1.4. 500 μL of bacterial culture was added to 500 μL of sterile 50% glycerol in a cryovial and placed immediately on dry ice until transfer to −80° C. freezer.

TABLE 6
Exemplary oligonucleotides for making guide RNA constructs
targeting GGTA1, CMAH, NLRC5, C3, and B4GALNT2

| | SEQ ID | | SEQ ID | |
|---|---|---|---|---|
| Gene | No. | Forward sequence (5′ to 3′) | No. | Reverse sequence (5′ to 3′) |
| C3 | 113 | acaccgcaaggggatattcgggtttg | 114 | aaaacaaacccgaatatccccttgcg |
| B4GALNT2 | 115 | acaccgtgcttttggtcctgagcgtg | 116 | aaaacacgctcaggaccaaaagcacg |
| (option1) | | | | |
| B4GALNT2 | 117 | acaccgtcgatcctcaagatattgag | 118 | aaaactcaatatcttgaggatcgacg |
| (opition2) | | | | |
| GGTA1 | 119 | acaccggggagagaagcagaggatgg | 120 | aaaaccatcctctgcttctctccccg |
| CMAH | 121 | acaccgtagaaaaggatgaagaaaag | 122 | aaaacttttcttcatccttttctacg |
| NLRC5 | 123 | acaccggcctcagaccccacacagag | 124 | aaaactctgtgtggggtctgaggccg |

TABLE 7
Exemplary sequencing primers for px330 plasmids

| SEQ | | SEQ ID | |
|---|---|---|---|
| ID No. | Forward sequence (5′ to 3′) | No. | Reverse sequence (5′ to 3′) |
| 125 | gccttttgctggccttttgctc | 126 | cgggccatttaccgtaagttatgtaacg |

### Example 2

### Generating a Plasmid Expressing Guide RNA Targeting the Rosa26 Locus in Pigs

[0389] Pigs with MHC deficiencies will provide transplant grafts that induce low or no immuno-rejection in a recipient. Exogenous proteins that inhibit MHC functions will be expressed in pigs to cause MHC deficiencies. Another goal of ours further along in the project is to insert one or more exogenous polynucleotides encoding one or more proteins under the control of a ubiquitous promoter that will direct ubiquitous expression of the one or more proteins. This example show generating a plasmid expressing guide RNA targeting one of such ubiquitous promoter, Rosa26. Rosa26 promoter will direct ubiquitous expression of a gene at the Rosa26 locus. Thus transgenic pigs will be generated by inserting transgenes encoding the exogenous proteins at the Rosa26 locus, so that the gene product will be expressed in all cells in the pig. A plasmid expressing guide RNA targeting Rosa26 will be used to facilitate insertion of a transgene into the Rosa26 locus. This example shows exemplary methods for generating plasmids for targeting the Rosa26 locus in pigs using the CRISPR/cas9 system. The plasmids were generated using the px330 vector, which was be used to simultaneously express a Cas9 DNA endonuclease and a guide RNA.

[0390] Sequencing Rosa26:

[0391] For designing guide RNA targeting Rosa26 locus in a pig, Rosa26 in the pig was sequenced to provide accurate sequence information.

[0392] Primer Design: The Rosa26 reference sequence utilized to generate primers was taken from Kong et. al., Rosa26 Locus Supports Tissue-Specific Promoter Driving Transgene Expression Specifically in Pig. PLoS ONE 2014; 9(9):e107945, Li et. al., Rosa26-targeted swine models for stable gene over-expression and Cre-mediated lineage tracing. Cell Research 2014; 24(4):501-504, and Li et. al., Identification and cloning of the porcine ROSA26 promoter and its role in transgenesis. Transplantation Technology 2014:2(1). The reference sequence was then expanded by searching the pig genome database (NCBI) and by using Ensembl Genome Browser. The base sequence was separated into four 1218 base pair regions to facilitate primer design. Primers were designed using Integrated DNA Technologies' PrimerQuest Tool and then searched against the Sus scrofa reference genomic sequences using Standard Nucleotide BLAST to check for specificity. Primer length was limited to 200-250 base pairs. Primer annealing temperature was calculated using the New England Tm Calculator for a primer concentration of 1000 nM and the Taq DNA Polymerase Kit.

[0393] PCR: PCR was performed using Taq DNA Polymerase with Standard Taq Buffer (New England Biolabs). DNA template used for the PCR was extracted from cells isolated from the cloned pig. PCR conditions were 30 cycles of: 95° C., 30 seconds; 50° C., 30 seconds, 51° C. 30 seconds, 52° C. 30 seconds, 53° C. 30 seconds, 54° C. 30 seconds, 55° C. 30 seconds; and an extension step at 68° for 30 seconds. PCR products were purified using the QIAquick PCR Purification Kit (Qiagen). Primers used for sequencing are listed in Table 8.

TABLE 8
Exemplary PCR primers for sequencing Rosa26

| SEQ ID No. | Primer Name | Sequence (from 5′ to 3′) |
|---|---|---|
| 127 | R26F008 | tctgattggctgctgaagtc |
| 128 | R26F013 | gtagccagcaagtcatgaaatc |
| 129 | R26R013 | gggagtattgctgaacctca |
| 130 | R26F014 | tcttgactaccactgcgattg |
| 131 | R26R014 | gttaggagccagtaatggagtt |
| 132 | R26F015 | agtgtctctgtctccagtatct |
| 133 | R26R015 | ttggtaaatagcaatcaactcagtg |
| 134 | R26F016 | tttctgctcaagtcacactga |
| 135 | R26R016 | caagcaatgacaacaacctgata |
| 136 | R26F017 | ttgctttctcctgatcccatag |
| 137 | R26R017 | cagtgctaatctagagcactacc |
| 138 | R26F018 | cattctcctgaagagctcagaat |
| 139 | R26R018 | tccattgggctttgtctatactt |
| 140 | R26F019 | gacaaaggaaattagcagagaacc |
| 141 | R26R019 | aactggtctttcccttggatatt |
| 142 | R26F020 | ctggctgcagcatcaatatc |
| 143 | R26R020 | gcctctattaattgcctttccc |
| 144 | R26F021 | ccattcacttcgcatccct |
| 145 | R26F005 | cgggaagtcgggagcata |
| 146 | R26R005 | gaggagaagcggccaatc |
| 147 | R26F006 | ctgctcttctcttgtcactgatt |
| 148 | R26R006 | gcgggagccactttcac |
| 149 | R26F008 | tctgattggctgctgaagtc |
| 150 | R26R008 | cgagagcaggtagagctagt |
| 151 | R26F010 | ggagtgccgcaataccttta |
| 152 | R26R010 | cctggactcatttcccatctc |
| 153 | R26F011 | gggtggagatgggaaatgag |
| 154 | R26F012 | gctacaccaccaaagtatagca |
| 155 | R26R012 | tggtggtggaacttatctgattt |
| 156 | R26F023 | agggggtacacattctcctga |
| 157 | R26R023 | gacctctgggttccattggg |
| 158 | R26F024 | caaagcccaatggaacccag |
| 159 | R26F025 | gaaggggctttcccaacagt |
| 160 | R26F026 | gcccaagacagggaaaacga |
| 161 | R26R026 | tgacaactctggtcgctctg |
| 162 | R26F028 | cagagagcctcggctaggta |
| 163 | R26R028 | aatggctccgtccgtattcc |
| 164 | R26F029 | gggaagtcgggagcatatcg |
| 165 | R26R029 | cactcccgaggctgtaactg |
| 166 | R26F030 | atggcgtgttttggttggag |
| 167 | R26R030 | ggagccactttcactgaccc |
| 168 | R26F031 | gggagggtcagtgaaagtgg |
| 169 | R26R031 | gagggccgtaccaaagacc |
| 170 | R26F032 | ggtcccaaatgagcgaaacc |
| 171 | R26R032 | gggtccgagagcaggtagag |
| 172 | R26F033 | ccgcctgaaggacgagacta |
| 173 | R26R033 | cagggcggtccttaggaaaa |
| 174 | R26F034 | gggagtgccgcaataccttt |
| 175 | R26R034 | gaaattgggctcgtcctcgt |
| 176 | R26F035 | cgaggacgagcccaatttct |
| 177 | R26R035 | agtgagggggcctaaggttt |
| 178 | R26F037 | actaccactgcgattggacc |
| 179 | R26R037 | aggagccagtaatggagttgt |
| 180 | R26F038 | cacaactccattactggctcct |
| 181 | R26R038 | ggagggtagcattccagagg |
| 182 | R26F021 | ccattcacttcgcatccct |
| 183 | R26R021 | ttgcagatgattgcttcctttc |
| 184 | R26F023 | agggggtacacattctcctga |
| 185 | R26R023 | gacctctgggttccattggg |
| 186 | R26F025 | gaaggggctttcccaacagt |
| 187 | R26R025 | gtggcgtatgccccagtatc |

[0394] Sequencing Analysis: SnapGene software was used to align the DNA sequences. After DNA sequence results were received from the University of Minnesota Biogenomics Center, they were uploaded into the SnapGene software and aligned by the software for analysis. Base pair substitutions, deletions, and insertions were determined by referencing to the chromatograms and confirmed by comparing sequences of DNA fragments amplified using different primers. When all of the edits and confirmations were done, the resulting new DNA parent sequence was made by replacing the original parent DNA sequence with the aligned one (SEQ ID No. 188, map shown in FIG. 12). The Rosa26 sequence was different from the reference Rosa26 sequence. For example, there were base pair substitution, at positions 223, 420, 3927, 4029, and 4066, and base pair deletion between positions 2692 and 2693. Nucleotide substitutions and deletions make this sequence unique (FIG. 12). Thus the sequencing data provided more accurate sequence information for designing guide RNA targeting the Rosa26 locus.

### Generating the Plasmid Expressing Guide RNA Targeting Rosa26

[0395] Oligonucleotides targeting Rosa26 was designed and synthesized by IDT. The sequences of the guide RNA are shown in Table 9. The px330 plasmid expressing guide RNA targeting Rosa26 was generated using methods described in Example 1. FIGS. 13A-13E show cloning strategies for cloning the plasmid targeting Rosa 26 (i.e., px330/ROSA exon 1) (FIGS. 13A-13E). The constructed px330 plasmid was validated by sequencing using sequencing primers shown in Table 7.

TABLE 9
Exemplary oligonucleotides for making guide RNA constructs targeting Rosa26

| | SEQ ID | | SEQ ID | |
|---|---|---|---|---|
| Gene | No. | Forward sequence (5′ to 3′) | No. | Reverse sequence (5′ to 3′) |
| Rosa26 | 189 | acaccgccggggccgcctagagaagg | 190 | aaaaccttctctaggcggccccggcg |

### Example 3

### Inserting HLA-G1 Transgene at Rosa26 Locus in Porcine Cells

[0396] A transgene-will be inserted into the Rosa26 locus in pigs so that the pigs will express the transgene in all cells. This example shows exemplary methods for inserting HLA-G1 cDNA into the Rosa26 locus in pig cells (e.g., porcine fetal fibroblasts). The resulting cells will be used to generate pigs expressing HLA-G1 controlled by the Rosa26 promoter, which will direct ubiquitous expression of HLA-G1 in the pigs.

[0397] The HLA-G1 gene constructs with 1000 bp homology arms specific to the GGTA1 or Rosa26 will be created and verified by PCR and sequencing. The cDNA sequence of HLA-G1 is shown in Table 2, and the genomic sequence of HLA-G is shown as SEQ ID: No. 191. The maps of the genomic sequence and cDNA of HLA-G are shown in FIGS. 14A-14B. The flanking regions of the GGTA1 and Rosa26 in the cells will be sequenced. The expression of HLA-G1 by the construct will be validated. After sequencing and expression validation, the gene-targeting constructs will be assembled with the transgene to create a homologous domain repair template that will be used to modify somatic pig cells. The CRISPR/Cas technology will be used to target the GGTA1 or Rosa26 with plasmid-expressed guide RNA oligos, enabling efficient gene targeting and modification. Double strand DNA breaks created by guide RNA will be created in the presence of HLA-G1 gene construct with 1000 bp homology arms inducing DNA repair that incorporates the transgene. Insertion sites within 50 bp of the promoter sequence through determined open reading frames (excluding intronic regions) will be tested based on the presence of PAM sequences and promoter strength to drive transgene expression in the presence of additional Cas9 expressing plasmids. The transgenic and knockout phenotype will be evaluated by flow cytometry (e.g., detection of the transgenes expression in the cytosol and membrane surface), Western blotting, and DNA/RNA sequencing.

### Example 4

### Generating Plasmids that Simultaneously Express Two Guide RNAs

[0398] An alternative vector (e.g., px333) simultaneously expressing two guide RNAs will also be used for expressing guide RNA targeting two regions of a single gene. Targeting two regions of a single gene by CRISPR/cas9 system will result in removal of the entire gene between the two cut sites when the DNA is repaired back together. Targeting two regions will increase the chance of producing a biallelic knockout, resulting in better sorts, more biallelic deletions, and overall a higher chance to produce pigs with a negative genotype, comparing to only targeting one locus in the gene.

[0399] The oligonucleotide pairs used in the px333 plasmid construction will contain higher G content, lower A content, and as many GGGG quadraplexes as possible, compared with the oligonucleotides used for the px330 plasmid. The GGTA1 targets will span nearly the entire GGTA1 gene, which will remove the entire gene from the genome. Furthermore, targeting multiple sites with this strategy will be used when inserting transgenes, which is another goal of ours further along in the project.

### Example 5

### Isolating, Culturing and Transfecting Porcine Fetal Fibroblasts for Making Genetically Modified Pigs

[0400] To generate genetically modified pigs using a px330 plasmid expressing guide RNA targeting a gene, the px330 plasmid was transfected into porcine fetal fibroblasts. The transfected fibroblasts will express the guide RNA that causes disruption of one or more target genes. The resulting fibroblasts were used for making genetically modified pigs, e.g., by somatic cell nuclear transfer. This example shows isolation and culturing porcine fetal fibroblasts, and transfection of the fibroblasts with a px330 plasmid.

[0401] Cell Culture

[0402] Fetal fibroblasts cell lines used in the generation of genetically modified pigs included: Karoline Fetal (derived from female porcine ponor P1101, which provided a high islet yield after islet isolation), Marie Louise Fetal (derived from female porcine donor P1102, which provided a high islet yield after islet isolation), Slaughterhouse pig #41 (Male; showed a high number of islets in the native pancreas (as assessed by a very high dithizone (DTZ) score)), Slaughterhouse pig #53 (showed a high number of islets in the native pancreas as assessed by a high dithizone (DTZ) score).

[0403] Muscle and skin tissue samples taken from each of these pigs were dissected and cultured to grow out the fibroblast cells. The cells were then harvested and used for somatic cell nuclear transfer (SCNT) to produce clones. Multiple fetuses (up to 8) were harvested on day 30. Fetuses were separately dissected and plated on 150 mm dishes to grow out the fetal fibroblast cells. Throughout culture, fetus cell lines were kept separate and labeled with the fetus number on each tube or culture vessel. When confluent, cells were harvested and frozen back at about 1 million cells/mL in FBS with 10% DMSO for liquid nitrogen cryo-storage.

[0404] Culture medium preparation: 5 mL Glutamax, 5 mL pen/strep, and 25 mL HI-FBS (for standard 5% FBS medium; use 10% FBS for sorted cells) were added to a 500 mL bottle of DMEM, high glucose, no glutamine, no phenol red. Centrifuge settings for spinning down all fetal fibroblasts were 5 minutes at 0.4 rcf (1600 rpm) at 4° C. Cells were thawed from liquid nitrogen storage by warming quickly to 37° C. in water bath. The thawed cells were quickly transferred to about 25 mL fresh, pre-warmed culture medium (enough to dilute the DMSO sufficiently). The cells were then spun down, the supernatant was removed and the cells were re-suspended in 1-5 mL fresh culture medium for counting or plating. Cells received a medium change every 3-4 days with pre-warmed medium, and were passaged when 90-100% confluent using TrypLE Express Dissociation Reagent.

[0405] Harvesting Adherent Fibroblasts: The medium was aspirated off the cells. DPBS was added to wash the cells. Pre-warmed (37° C.) TrypLE Express reagent was added to the cells. Minimum amount of the reagent was used to cover the cell layer thinly. The cells were incubated at 37° C. for 10 minutes. A volume of culture medium containing FBS was added to the TrypLE cell suspension to neutralize the enzyme. The cell suspension was pipetted up and down to dislodge all cells from the culture surface. The cell suspension was transferred to a 15 or 50 mL conical tube on ice. The plate/flask was checked under a microscope to ensure all cells were collected. Sometimes a medium wash helped collect cells that were left behind. The cells were spun down, and then re-suspended with fresh culture medium (between 1-5 mL for counting). If counting, a 1:5 dilution of the cells suspension was prepared by adding 20 μL cell suspension to 80 μL 0.2% Trypan Blue. The suspension was mixed well by pipetting up and down. 12-14 μL of the dilution was added to a hemocytometer to count the 4 corners. The numbers were averaged. For example, counting 20, 24, 22, 22 for each corner yielded an average of 22. This number was multiplied by the dilution factor 5, yielding 110×10⁴ cells/mL. The number was adjusted to 10⁶ by moving the decimal two places to the left, 1.10×10⁶ cells/mL. Finally, the numbers were multiplied by how many mL's the original sample was taken from to get the total number of cells.

### Transfection of Fetal Fibroblasts

[0406] This experiment was to transfect fetal fibroblasts. The transfected fetal fibroblasts were used to generate genetically modified animal using the somatic cell nuclear transfer technique.

[0407] The GFP plasmid used (pSpCas9(BB)-2A-GFP) for transfection was an exact copy of the px330 plasmid, except that it contained a GFP expression region.

[0408] GFP transfected control cells: Transfections were done using the Neon Transfection System from Invitrogen. Kits came in 10 μL and 100 μL tip sizes. A day or two before the experiment, cells were plated in appropriate culture vessel depending on size of experiment and desired cell number and density. About 80% confluence was achieved on day of transfection.

[0409] On the day of the experiment, Neon module and pipette stand was set up in a biohood. A Neon tube was placed in the pipette stand and 3 mL of Buffer E (Neon Kit) was added to the Neon tube. The module was turned on and adjusted to desired settings (for fetal porcine fibroblasts: 1300 V, 30 ms, 1 pulse). Cells were harvested using TrypLE and counted to determine the experimental setup. Needed amount of cells were transferred to a new tube and remaining cells were re-plated. Cells were spun down after counting, and re-suspended in PBS to wash. The cells were spun down and re-suspended in Buffer R (Neon Kit) according to Table 10 for the number of cells and tip sizes.

TABLE 10
Exemplary Neon ® plate formats, volumes, and recommended kits

| | | DNA | siRNA | | Vol. plating | | Buffer R or |
|---|---|---|---|---|---|---|---|
| Format | Cell Type | (μg) | (nM) | Neon ®Tip | medium | Cell no. | Buffer T |
| 96-well | Adherent | 0.25-0.5 | 10-200 | 10 μL | 100 μL | 1-2 × 10⁴ | 10 μL/well |
| | Suspension | 0.5-1 | | 10 μL | | 2-5 × 10⁴ | 10 μL/well |
| 48-well | Adherent | 0.25-1 | 10-200 | 10 μL | 250 μL | 2.5-5 × 10⁴ | 10 μL/well |
| | Suspension | 0.5-2 | | 10 μL | | 5-12.5 × 10⁴ | 10 μL/well |
| 24-well | Adherent | 0.5-2 | 10-200 | 10 μL | 500 μL | 0.5-1 × 10⁵ | 10 μL/well |
| | Suspension | 0.5-3 | | 10 μL | | 1-2.5 × 10⁵ | 10 μL/well |
| 12-well | Adherent | 0.5-3 | 10-200 | 10 μL | 1 mL | 1-2 × 10⁵ | 10 μL/well |
| | Suspension | 0.5-3 | | 10 μL | | 2-5 × 10⁵ | 10 μL/well |
| 6-well | Adherent | 0.5-3 | 10-200 | 10 μL/ | 2 mL | 2-4 × 10⁵ | 10 μL or |
| | | (10 μL) | | 100 μL | | | 100 μL/well |
| | | 5-30 | | | | | |
| | | (100 μL) | | | | | |
| | Suspension | 0.5-3 | | 10 μL/ | | 0.4-1 × 10⁶ | 10 μL or |
| | | (10 μL) | | 100 μL | | | 100 μL/well |
| | | 5-30 | | | | | |
| | | (100 μL) | | | | | |
| 60 mm | Adherent | 5-30 | 10-200 | 100 μL | 5 mL | 0.5-1 × 10⁶ | 100 μL/well |
| | Suspension | 5-30 | | 100 μL | | 1-2.5 × 10⁶ | 100 μL/well |
| 10 cm | Adherent | 5-30 | 10-200 | 100 μL | 10 mL | 1-2 × 10⁶ | 100 μL/well |
| | Suspension | 5-30 | | 100 μL | | 2-5 × 10⁶ | 100 μL/well |

[0410] Appropriate amount of DNA according to Table 10 was added to cell suspension and mixed by pipetting up and down. A Neon tip was applied from the kit to the Neon pipette to aspirate the volume of cell suspension into the Neon tip. The pipette was placed into the Neon tube in the pipette stand so that the Neon tip was submerged in the Buffer E. START was pressed on module interface until a “complete” message appeared. The pipette was removed from the pipette stand to eject the cell suspension into a volume of pre-warmed culture medium without antibiotics in a well of appropriate size according to Table 10.

[0411] The above steps were repeated until the entire cell suspension was used. Neon tips were changed every 2 transfections, and Neon tubes were changed every 10 transfections. The cells were incubated at 37° C. for 24 hours, and then the medium was changed with normal culture medium containing antibiotics. The resulting cells were cultured for about 5 days to allow for Cas9 cleavage, complete recycling of surface proteins after gene knockout, and proper cell division before sorting. The cells transfected with the GFP plasmid were shown in FIG. 15.

### Example 6

### Verifying Guide RNA Production by Px330 Plasmids Using RNA Polymerase

[0412] After a px330 plasmid is transfected to porcine fetal fibroblasts, the expression of guide RNA by the px330 plasmid will be verified using an RNA polymerase.

[0413] The guide RNA production by px330 plasmids will be verified by in vitro transcription of the correctly constructed plasmids by an RNA polymerase. The experiment will use the T7 RNA polymerase with a promoter introduced through PCR of the target region. Production of sgRNA by the T7 RNA polymerase will indicate that the plasmid is transcribed and the sgRNA is present in the cells. Gel verification of the reaction product (e.g., sgRNA) size will be used to confirm sgRNA transcription by the RNA polymerase.

### Example 7

### Fluorescence In Situ Hybridization (FISH) to the GGTA1 Gene

[0414] Gene disruption by CRISPR/cas9 was verified using FISH in a cell. This example shows exemplary methods for detecting GGTA1 gene using fluorescence in situ hybridization (FISH). The methods here were used to verify the presence or absence of a GGTA1 gene in a cell from an animal (e.g., an animal with GGTA1 knocked out).

[0415] Preparation of FISH Probes:

[0416] GGTA1 DNA was extracted from an RP-44 pig BAC clone (RP44-324B21) using an Invitrogen PureLink kit. The DNA was labeled by nick translation reaction (Nick Translation Kit—Abbott Molecular) using Orange—552 dUTP (Enzo Life Science). Sizes of the nick translated fragments were checked by electrophoresis on a 1% TBE gel. The labeled DNA was precipitated in COT-1 DNA, salmon sperm DNA, sodium acetate and 95% ethanol, then dried and re-suspended in 50% formamide hybridization buffer.

[0417] Hybridization of FISH Probes:

[0418] The probe/hybridization buffer mix and cytogenetic slides from pig fibroblasts (15AS27) were denatured. The probe was applied to the slides, and the WSGR Docket No. 47190-701.201 slides were hybridized for 24 hours at 37° C. in a humidified chamber. The probe used is shown as SEQ ID No: 192.

[0419] FISH Detection, Visualization and Image Capture:

[0420] After hybridization, the FISH slides were washed in a 2×SSC solution at 72° C. for 15 seconds, and counterstained with DAPI stain. Fluorescent signals were visualized on an Olympus BX61 microscope workstation (Applied Spectral Imaging, Vista, Calif.) with DAPI and FITC filter sets. FISH images were captured using an interferometer-based CCD cooled camera (ASI) and FISHView ASI software. The FISH image is shown in FIG. 16.

### Example 8

### Phenotypic Selection of Cells with Cas9/Guide RNA-Mediated GGTA1 Knockout

[0421] Disruption of GGTA1 gene by the Cas9/guide RNA system were verified by labeling GGTA1 gene products. The GGTA1 knockout will be used as a marker for phenotypic sorting in knockout experiments. The GGTA1 gene encoded for a glycoprotein found on the surface of pig cells that if had been knocked out, would result in the glycoprotein being absent on the cell's surface. The lectin used to sort for GGTA1 negative cells was Isolectin GS-IB₄ Biotin-XX conjugate, which selectively bound terminal alpha-D-galactosyl residues, such as the glycoprotein produced by the GGTA1 gene.

[0422] Porcine fetal fibroblast cells were transfected with px330 plasmid expressing guide RNA targeting GGTA1 (generated in Example 1).

[0423] To select for negative cell after transfection, the cells were allowed to grow for about 5 days to recycle their surface proteins. The cells were then harvested, and labeled with the IB₄ lectin. The cells were then coated with DynaBeads Biotin-Binder, which were 2.8 micron supermagnetic beads that had a streptavidin tail that bound very tightly with the biotin-conjugated lectin on the surface of the cells. When placed in a magnet, the “positive” cells with lectin/beads hound on the surface stick to the sides of the tube, while the “negative” cells did not hind an beads and remained floating in suspension for an easy separation.

[0424] In detail, the cells were harvested from a plate using a TrypLE protocol and collected into a single tube. The cells were spun down, and re-suspended in 1 mL of sorting medium (DMEM, no supplements) to count. If less than 10 million cells, the cells were spun down and the supernatant was discarded. In a separate tube, IB₄ lectin (1 μg/μL) was diluted by 5 μL to 1 mL of sorting medium (final concentration 5 μg/mL). The cell pellet was re-suspended with the 1 mL of diluted lectin. The cell suspension was incubated on ice for about 15-20 minutes, with gentle sloshing every few minutes.

[0425] Biotin beads were prepared during incubation. A bottle of beads were vortexed for 30 seconds. 20 μL beads/1M cells were added to 5 mL of sorting medium in a 15 mL conical tube. The tube was vortexed, placed in DynaMag-15 magnet and let stand for 3 minutes. Medium were removed. 1 mL of fresh sorting medium was added and the tube was vortexed to wash the beads. The washed beads were placed on ice until use.

[0426] After cell incubation, cell suspension's volume was brought to 15 mL with sorting medium to dilute the lectin. The cells were spun and re-suspended with 1 mL of the washed biotin beads. The suspension was incubated on ice for 30 minutes in a shaking incubator at 125 rpm. The cell suspension was removed from shaking incubator and inspected. Small aggregates might be observed.

[0427] 5 mL of sorting medium was added to the cell suspension and the tube was placed in the DynaMag-15 for 3 minutes. The first fraction of “negatives” cells was collected and transferred to a new 15 mL conical tube. Another 5 mL sorting medium was added to wash the “positive” tube that was still on the magnet. The magnet was inverted several times to mix the cell suspension again. The tube was let stand for 3 minutes to separate cells. The second “negative” fraction was then removed and combined with the first fraction. 10 mL sorting medium was added to the “positive” tube. The tube was removed from the magnet, and placed in an ice bath until ready to use.

[0428] The tube of “negative” fractions was placed onto the magnet to provide a secondary separation and remove any bead-bound cells that might have crossed over from the first tube. The tube was kept on the magnet for 3 minutes. The cells were pipetted away from the magnet and transferred into a new 15 mL conical tube. The original “positive” tube and the double sorted “negative” tube were balanced and cells in them were spun down. The pellet of the “positives” appeared a dark, rusty red. The “negative” pellet was not visible, or appeared white.

[0429] Each pellet was re-suspended in 1 mL of fresh culture medium (10% FBS) and plated into separate wells on a 24-well plate. The wells were inspected under a microscope and diluted to more wells if necessary. The cells were cultured at 37° C. The genetically modified cells, i.e., unlabeled cells were negatively selected by the magnet (FIG. 17A). The non-genetically modified cells, i.e., the labeled cells had accumulated ferrous beads on the cell surface (FIG. 17B).

### Example 9

### Making GGTA1/CMAH/NLRC5 Triple Knockout Pigs

[0430] This example shows exemplary methods for generating a triple knockout pigs. A triple knockout pig can have reduced protein expression of three of the following: NLRC5, TAP1, C3, CXCL10, MICA, MICB, CIITA, CMAH, GGTA1 and/or B4GALNT2. One of such triple knockout pig was GGTA1/CMAH/NLRC5 triple knockout pigs using CRISPR/cas9 system. The pigs provided islets for transplantation. Porcine islets with disrupted GGTA1/CMAH/NLRC5 had MHC class I deficiency and will induce low or no immuno-rejection when transplanted to a recipient.

### Transfection of Fetal Fibroblasts

[0431] The px330 plasmids expressing guide RNA targeting GGTA1, CMAH, and NLRC5 generated in Example 1 were transected in porcine fetal fibroblasts. Pig fetal fibroblasts were cultured in DMEM containing 5-10% serum, glutamine and penicillin/streptomycin. The fibroblasts were co-transfected with two or three plasmids expressing Cas9 and sgRNA targeting the GGTA1, CMAH or NLRC5 genes using Lipofectamine 3000 system (Life Technologies, Grand Island, N.Y.) according to the manufacturer's instructions.

### Counter-Selection of GGTA1 KO Cells

[0432] Four days after transfection, the transfected cells were harvested and labeled with isolectin B4 (IB4)-biotin. Cells expressing αGal were labeled with biotin conjugated IB4 and depleted by streptavidin coated Dynabeads (Life Technologies) in a magnetic field. The αGal deficient cells were selected from the supernatant. The cells were examined by microscopy. The cells containing no or very few bound beads after sorting were identified as negative cells.

### DNA Sequencing Analysis of the CRISPR/Cas9 Targeted GGTA1, CMAH and NLRC5 Genes

[0433] Genomic DNA from the IB4 counter-selected cells and cloned pig fetuses were extracted using Qiagen DNeasy Miniprep Kit. PCR was performed with GGTA1, CMAH and NLRC5 specific primer pairs as shown in Table 11. DNA polymerase, dNTPack (New England Biolabs) was used and PCR conditions for GGTA1 were based on annealing and melting temperature ideal for those primers. The PCR products were separated on 1% agarose gel, purified by Qiagen Gel Extraction Kit and sequenced by the Sanger method (DNA Sequencing Core Facility, University of Minnesota) with the specific sequencing primers as shown in Table 7. FIGS. 18A-18C show the sequences and agarose gel images of the PCR products.

TABLE 11
Exemplary PCR primers for amplifying genomic DNA from
genetically modified cells and animals

| | SEQ ID | | SEQ ID | |
|---|---|---|---|---|
| Gene | No. | Forward sequence (5′ to 3′) | No. | Reverse sequence(5′ to 3′) |
| GGTA1 | 193 | cttcgtgaaaccgctgtttatt | 194 | gactggaggactttgtcttctt |
| CMAH | 195 | tgagttccttacgtggaatgtg | 196 | tcttcaggagatctgggttct |
| NLRC5 | 197 | ctgctctgcaaacactcaga | 198 | tcagcagcagtacctcca |

### Somatic Cell Nuclear Transfer (SCNT)

[0434] SCNT was performed as described by Whitworth et al. Biology of Reproduction 91(3):78, 1-13, (2014), which is incorporated herein by reference in its entirety. The SCNT was performed using in vitro matured oocytes (DeSoto Biosciences Inc., St. Seymour, Tenn.). Cumulus cells were removed from the oocytes by pipetting in 0.1% hyaluronidase. Only oocytes with normal morphology and a visible polar body were selected for SCNT. Oocytes were incubated in manipulation media (Ca-free NCSU-23 with 5% FBS) containing 5 μg/mL bisbenzimide and 7.5 μg/mL cytochalasin B for 15 min. Oocytes were enucleated by removing the first polar body plus metaphase II plate. A single cell was injected into each enucleated oocyte, fused, and activated simultaneously by two DC pulses of 180 V for 50 μsec (BTX cell electroporator, Harvard Apparatus, Hollison, Mass., USA) in 280 mM Mannitol, 0.1 mM CaCl₂, and 0.05 mM MgCl₂. Activated embryos were placed back in NCSU-23 medium with 0.4% bovine serum albumin (BSA) and cultured at 38.5° C., 5% CO₂ in a humidified atmosphere for less than 1 hour, and transferred into the surrogate pigs.

### Example 10

### Making NLRC5 Knockout Non-Human Animals Expressing an ICP47 Transgene

[0435] This example shows exemplary methods for generating genetically modified non-human animals (e.g., pigs) with reduced expression of one or more endogenous genes and meanwhile expressing one or more transgenes. Such generating genetically modified non-human animals (e.g., pigs) will have reduced expression of one or more of NLRC5, TAP1, C3, CXCL10, MICA, MICB, CIITA, CMAH, GGTA1 and/or B4GALNT2, and meanwhile expressing one or more ICP47, CD46, CD55, CD59 HLA-E, HLA-G (e.g., HLA-G1, HLA-G2, HLA-G3, HLA-G4, HLA-G5, HLA-G6, or HLA-G7), L2, Spi9, galectin-9 CD47, B2M, PD-L1, and/or PD-L2. One of such animal will have disrupted NLRC5 gene and meanwhile overexpressing a transgene encoding ICP47. NLRC5 disruption and ICP47 expression will suppress MHC-1 assembly and function. Thus, cells, tissues, and/or organs from the genetically modified non-human animals (e.g., pigs) will induce low or no immuno-rejection when transplanted to a recipient.

### Cloning Rosa26 Promoter

[0436] The Rosa26 promoter sequence will be obtained by searching genome databases (NCBI) using mouse Rosa26 promoter sequence and human Rosa26 promoter sequence as references. The non-human animal's version of the Rosa26 will be obtained. Primers will be designed to amplify a DNA fragment harboring potential Rosa26 promoter (e.g., porcine Rosa26 promoter) by PCR using the non-human animal's (e.g., a domestic pig's) genomic DNA as a template. AscI and MluI sites will be added to the 5′ of forward and reverse primers, respectively. Pwo SuperYield DNA Polymerase (Roche, Indianapolis, Ind.) will be used and PCR conditions will be as follows: 94° C., 2 minutes; 94° C., 15 seconds, 55° C., 30 seconds; 72° C. 4 minutes for 15 cycles; 94° C., 15 seconds, 55° C., 30 seconds; 72° C. 4 minutes and 5 seconds added to each cycle for 25 cycles; and a final extension step of 72° C. for 8 minutes. The PCR product will be subsequently cloned into pCR-XL-TOPO vector (Invitrogen, Carlsbad, Calif.) to generate pCR-XL-Rosa26. The non-human animal's Rosa promoter (e.g., porcine Rosa26 promoter) will be sequenced using designed primers.

### Construction of Transgenic Vector

[0437] CMV promoter and multiple cloning site (MCS) of pEGFP-N1 (Clontech, Palo Alto, Calif.) will be replaced by a linker AseI-NruI-AscI-SalI-MluI-PvuI-BamHI. A 3.9 kb fragment containing the potential non-human animal's (e.g., porcine) Rosa26 promoter will be excised from pCR-XL-Rosa26 with AscI and MluI digestion and inserted to the promoterless pEGFP-N1 between AscI and Mlu I sites, resulting in plasmid pRosa26-EGFP. Human ICP47 cDNA will be cloned to replace EGFP in the plasmid. The control vector will be constructed by cloning of ICP47 cDNA to the downstream of murine MHC class I H-2K^{b} promoter at EcoRI site, resulting in plasmid pH-2K^{b}-ICP47.

### Transient Transfection

[0438] NLRC5 KO fetal fibroblast cells from the NLRC5 knockout non-human animals (e.g., pigs) made by the methods of Example 1 or Example 2 will be obtained. To compare promoter strength among Rosa26, H-2K^{b}, and CMV, fetal fibroblast cells will be transfected with pRosa26-ICP47, pH-2K^{b}-ICP47 and pEGFP-N1 by using Neon™ Transfection System (Invitrogen, Carlsbad, Calif.) as per the manufacturer instructions. 3×10⁵ cells will be mixed with 1.5 μg of each DNA, respectively, and electroporated at 1300V, 30 ms, 1 pulse. Then cells will be cultured at 37° C. with 5% CO₂ and 10% O₂. After 48 hours, cells will be harvested and ICP47 expression will be examined by Western blot and/or flow cytometry. Untransfected fetal fibroblasts will be used as a control.

### Establishment of EGFP Stable Cell Line

[0439] NLRC5 KO fetal fibroblasts at 80-90% confluence will be harvested with trypsin and washed with calcium and magnesium free DPBS (Invitrogen, Carlsbad, Calif.). pRosa26-ICP47 will be linearized by Asc I digestion. Transfection will be performed by using Neon™ Transfection System (Invitrogen). Briefly, 10⁶ cells will be suspended in 120 μl of R buffer and 2 μg of linearized DNA will be added. Cells will be electroporated at 1300V, 30 ms, 1 pulse, and plated onto collagen I coated plates (BD) in the culture media without antibiotics. After 48 hours, the culture media will be replaced with selection media containing 100 μg/ml of G418 (Invitrogen). After 10 days of G418 selection the ICP47 positive cells will be isolated by flow sorting. The selected cells will be expanded and the second flow sorting will be performed to purify and enrich the ICP47 positive cells.

### Somatic Cell Nuclear Transfer

[0440] SCNT will be performed using in vitro matured oocytes (DeSoto Biosciences Inc. St Seymour, Tenn. and Minitub of America, Mount Horeb, Wis.). Cumulus cells will be removed from the oocytes by pipetting in 0.1% hyaluronidase. Only oocytes with normal morphology and a visible polar body will be selected for cloning. Oocytes will be incubated in manipulation media (Ca-free NCSU-23 with 5% FBS) containing 5 mg/mL bisbenzimide and 7.5 mg/mL cytochalasin B for 15 min. Following this incubation period, oocytes will be enucleated by removing the first polar body and metaphase II plate, and one single cell will be injected into each enucleated oocyte. Electrical fusion will be induced with a BTX cell electroporator (Harvard Apparatus, Holliston, Mass.). Couples will be exposed to two DC pulses of 140 V for 50 ms in 280 mM Mannitol, 0.001 mM CaCl₂, and 0.05 mM MgCl₂. One hour later, reconstructed oocytes will be activated by two DC pulses of 120 V for 60 ms in 280 mM Mannitol, 0.1 mM CaCl₂, and 0.05 mM MgCl₂. After activation, oocytes will be placed back in NCSU-23 medium with 0.4% bovine serum albumin BSA and cultured at 38.5° C., 5% CO₂ in a humidified atmosphere, for less than 1 h before being transferred into the recipient. Recipients will be synchronized non-human animals (e.g., occidental pigs) on their first day of estrus.

### Genotyping of ICP47 Transgenic Fetuses

[0441] The pregnancy will be terminated at day 35 and fetuses will be harvested. Genomic DNA will be extracted using DNeasy Blood & Tissue Kit (Qiagen). PCR primers will be designed to detect ICP47 cDNA sequence in the genome. The 20 μl of reaction mixture contained 10 μl of 2×Go-Taq Green Master Mix (Promega, Madison, Wis.), 5 pmol of each primer, and 50 ng of genomic DNA. PCR will be performed to detect the presence or absence of ICP47 insert. Genomic DNA extracted from normal cells will be used as negative control.

### Example 11

### Making NLRC5 Knockout Non-Human Animals by Injecting RNA Encoding Cas9 and Guide RNA

[0442] An alternative approach to targeting a gene using CRISPR/cas will be to directly inject an RNA molecule encoding Cas9 and a guide RNA (e.g., single guide RNA (sgRNA)) into a cell to disrupt a gene by CRISPR/cas9 system. This example shows exemplary methods for disrupting NLRC5 in non-human animals (e.g., pigs) by injection of RNA encoding Cas9 and a single guide RNA (sgRNA).

[0443] The sgRNA targeting the NLRC gene will be designed and synthesized. To construct the Cas9 encoding plasmid, the Cas9 coding sequence will be synthesized and then cloned into the pEASY-T1 vector, which harbors a T7 promoter for the in vitro transcription of Cas9. A SV40 polyadenylation signal will be at the 3′ end of the Cas9 cassette, and a unique HindIII restriction site will be outside of SV40 signal for linearization. The T7 promoter containing sgRNA scaffold will also be ordered and cloned into a promoterless pUC19 vector. Two BsaI restriction sites will be used for the spacer insertion and the plasmid will be linearized by PsiI for in vitro transcription. For targeting vector construction, a site-specific 20 nt spacer will be synthesis and cloned into T7-sgRNA scaffold between BsaI restriction sites.

[0444] To prepare Cas9 mRNA, T7-Cas9 expression plasmid will be linearized by HindIII, and purified using DNA Clean & Concentrator™-5 (ZYMO Research).

[0445] To prepare sgRNA, the sgRNA vector will be linearized using PsiI and purified by using DNA Clean & Concentrator™-5 (ZYMO Research).

[0446] All the linearized plasmid will be in vitro transcribed by T7 High Yield RNA Synthesis Kit (NEB) following the manufacturer's instruction. To synthesize Cas9 mRNA, the m7G(5′)G RNA Cap Structure Analog (NEB) will be additionally added to stabilized the transcribed mRNA. Prepared RNA will be purified using MicroElute RNA Clean-Up Kit (Omega) and recovered in DEPC water.

[0447] The zygotes from the non-human animal, e.g., Bama minipig, will be collected on the next of insemination, transferred to manipulation medium and subjected to a single cytoplasmic microinjection of 2-10 pl of 125 ng/μl Cas9 mRNA and 12.5 ng/μl sgRNA. Alternatively, fertilized oocytes of the non-human animal will be collected. The Cas9 and sgRNA will be injected into the fertilized oocytes to generate genetically modified offspring. To test the viability of non-human animal (e.g., pigs) embryos after RNA injection, in vitro produced parthenogenetic embryos will be used for preliminary experiment. For parthenogenetic embryos preparation, non-human animal (e.g., pig) ovaries will be collected, washed with pre-warmed saline and follicles aspirated. Oocytes will be washed in TL-HEPES before culturing in maturation medium for 44 hours. Matured MII oocytes will be depleted off surrounding cumulus cells by gentle pipetting, followed by electrical activation by two direct current pulses (1-sec interval) of 1.2 kV/cm for 30 microseconds. Activated oocytes will be transferred to TL-HEPES medium and subjected to a single 2-10 pl cytoplasmic injection of 125 ng/μl Cas9 mRNA and 12.5 ng/μl sgRNA. Zygotes and activated oocytes will be cultured to blastocyst stage in PZM3 medium for 144 hours under 5% CO2, 39° C.

[0448] Cas9 mRNA and the guide RNA will be co-injected to non-human animal zygotes (e.g., pig zygotes). The in vitro developmental efficiencies of zygotes injected with Cas9 mRNA/guide RNA and zygotes injected with water will be measured to determine effect of microinjection manipulation the Cas9 mRNA/guide RNA on non-human animal (e.g., pig) early embryonic development.

[0449] The injected embryos will be transferred into surrogate non-human animals (e.g., pigs) to produce offspring (e.g., piglets). The survived embryos will be transferred into the oviduct of recipient gilts on the day or 1 day after estrus, following mid-line laparotomy under general anesthesia. Pregnancy will be diagnosed about after 28 days, and then checked regularly at 2-week intervals by ultrasound examination. All of the microinjected offspring (e.g., piglets) will be delivered by natural birth.

[0450] A total of 76 injected embryos will be transplanted into 5 surrogate mothers in 5 independent experiments. Insertions or deletions in the targeting sites of the NLRC5 gene will be detected by T7 endonuclease I (T7EI) assay. Genotypes of the offspring (e.g., piglets) will be analyzed by Sanger sequencing of the PCR products containing the targeting site of each individual offspring (e.g., piglets).

### Example 12

### Identifying Immune Cells that Respond to Porcine Islet Xenografts in Nonhuman Primates

[0451] This example shows exemplary methods for identifying the targeting immune cells for immune intervention in cellular xenotransplantation. To this end, the phenotypes of circulating and graft T and B lymphocyte subsets with effector and regulatory functions were studied in cynomolgus macaques (CM) receiving immunosuppression without and with donor antigen-specific immunotherapy for the prevention of porcine islet xenograft rejection.

[0452] Cellular immunity to intraportal porcine islet xenografts was retrospectively analyzed in 4 cohorts of diabetic CM: induction with α-CD40 and maintenance with CTLA4-Ig and rapamycin (Cohort A; n=4; graft function 77 to 333 days); induction with CTLA4-Ig and maintenance with α-CD40 and rapamycin (Cohort B; n=3; stable graft function more than 180 days); induction with α-CD40, α-CD20, and rapamycin, no maintenance (Cohort C; n=2; graft function for 32 and 40 days), and induction with peritransplant infusions of apoptotic donor leukocytes under the cover of α-CD40, α-CD20, and rapamycin, no maintenance (Cohort D; n=3; graft function for 81, 100, and 113 days). The frequencies of circulating immune cell subsets and liver mononuclear cells (LMNC) at sacrifice were determined by flow cytometry. LMNC were also analyzed for effector molecules after ex-vivo stimulation with donor antigen. Statistical significance was determined using unpaired t test with or without Welch's correction.

[0453] Baseline frequencies of circulating immune cell subsets were not different between Cohorts. Compared with Cohort A CM, through day 100 post-transplant, Cohort B CM showed: i) significant increases in ratios of naïve (CD3-CD20+CD21+CD27−) vs. activated memory (CD3-CD20+CD21+CD27+) and immature (CD3-CD19+CD27-IgM+) vs. mature (CD3-CD19+CD27+CD38+) circulating B cells, ii) significant increases in circulating Bregs (CD19+CD24hiCD38hi), Tregs (CD4+CD25+FoxP3+CD127), and Natural Suppressor Cells (NSC; CD122+CD8+), and iii) comparable circulating frequencies of CD8+ effector memory (TEM) cells (CD2hiCD28-CD8+). Cohort C but not D CM showed a significant expansion of CD8+TEM at day 14 post-transplant. Compared with Cohort C CM, at day 50±10 post-transplant, Cohort D CM showed significant increases in circulating frequencies of Tregs and NSC. By day 50, there was also a significant expansion of CD8+TEM in Cohort D. In CM terminated because of presumed rejection, LMNC showed a substantial presence of CXCR3+CD4+ and CD8+ T cells and CD20+ B cells (including in α-CD20 treated Cohort C and D CM); CD8+TEM were the predominant phenotype among LMNCs. Upon ex-vivo stimulation with donor antigen, these CD8+TEM showed abundant staining for IFN-γ, TNF-α, and Perforin.

[0454] The results provided insights into the effects of immunotherapy on cellular immunity in pig-to-CM islet xenotransplantation and identify B cells and CD8+TEM as targets for immune intervention in cellular xenotransplantation.

### Example 13

### Suppressing SLA on Pig Islets Inhibited Human CD8+ T Cells Response to the Pig Islets

[0455] To determine whether suppression of MHC in pig islets (e.g., SLA) can inhibit T cell activation in a human recipient, SLA antibodies were used to suppress MHC on the pig islets, and human T cells' response to the pig islets was examined.

[0456] Human peripheral blood mononuclear cells were cultured with adult pig islets for 7 days with or without an anti-SLA class I blocking antibody. Proliferation of highly purified human CD8+ T cells (hCD8), human CD4+ T cells (hCD4), and human natural killer cells (hNK) were measured. The proliferation of the highly purified human CD8+ T cells, but not CD4+T or NK cells, was inhibited. The recognition of MHC class I molecules on pig islets was blocked by the anti-SLA class I blocking antibody after 7 days in the mixed culture (FIG. 19A).

[0457] Adult pig islets cultured with or without highly purified lymphocytes for 7 days in the present or absence of an anti-SLA class I blocking antibody. The viability of the cultured cells was assessed by acridine orange (AO) and propidium iodide (PI) staining. Cytotoxicity of purified CD8+ T cells was inhibited in the presence of the anti-SLA I antibody (FIG. 19B). In spite of significant proliferation, CD4+ T cells left islets relatively unharmed when compared to the cytotoxicity of CD8+ T cells (FIG. 19B).

### Example 14

### Suppressing T Cell Activation by ECDI-Fixed Splenocytes in a Monkey Transplanted with Porcine Islets

[0458] To determine whether apoptotic splenocytes from a xenograft donor can suppress immuno-rejection of the xenograft by a recipient, the apoptotic splenocytes from the donor were administered to the recipient before and after transplant. Then T cell activation in the recipient's PBMCs was examined.

[0459] Porcine islets were transplanted to a diabetic monkey. Apoptotic splenocytes prepared from islets donor were administered to the monkey 1 day before and 7 days after transplant. PBMCs were collected from the monkey before transplantation, and 7, 14, 28, 49, 77, and 91 days after transplantation. Direct and indirect T cell activation in the PBMCs was examined by ELISPOT. The ELISPOT result was shown as spot-forming cells (SFC)/10⁶ PBMCs (FIG. 20A). On day 141, an islet was collected from the monkey and CD8 was detected by immunohistochemistry using anti-CD8 antibody (FIG. 20B). PBMCs from 42 non-transplanted monkeys were used as a negative control (“Controls”). PBMCs from 10 monkeys transplanted with non-genetically modified porcine islets were used as a positive control (“Rejectors”). Administration of splenocytes significantly reduced T cell activation induced by the porcine islets in the monkey.

### Example 15

### Treating Diabetes by Transplanting Immuno-Modulated Porcine Islets and ECDI-Fixed Splenocytes from the Same Donor in Monkeys without Maintenance of Immunosuppression

[0460] In addition to testing the immunosuppression effect of ECDI-fixed donor cells on immune cells in Example 14, experiments in this example examined the immunosuppression effect of ECDI-fixed donor cells in vivo (in monkeys). The results showed that ECDI-fixed splenocytes from a pig reduced the immuno-rejection in a monkey transplanted with islets from the pig.

[0461] A diabetic monkey was transplanted with porcine islets. The monkey was given ECDI-fixed donor splenocytes (by intravenous infusion) 7 days before and 1 day after the transplantation. Immunosuppression drugs were given from the day of transplantation through day 21 after the transplantation. Small doses of exogenous insulin were administered through day 21 after the transplantation. The exogenous insulin (shown in gray bars) needed to maintain normal blood glucose level was reduced on the day of transplantation and completely stopped on day 21. Blood glucose level (shown in lines) became normal immediately after transplantation and continued to be normal despite discontinuation of insulin on day 21. The blood glucose level kept normal without exogenous insulin over day 100 after transplantation (FIG. 21A). The blood C-peptide levels including the peak value after transplantation, the random level, and the level under fasting and glucose-stimulation conditions were tested (FIG. 21B).

[0462] The glucose metabolism of the monkey was examined by intravenous glucose tolerance test (IVGTT) (FIGS. 21C and 21D). In IVGTT, exogenous glucose was injected to the monkey, and the blood glucose level was measured over time after the injection. IVGTT was performed on the monkey on day 28 and day 90 after transplantation. Non-transplanted monkeys treated with or without streptozotocin were used as controls. The non-transplanted monkeys treated with streptozotocin were used as a diabetic control. The blood glucose (FIG. 21C) and C-peptide (FIG. 21D) levels were measured and compared with the controls.

### Example 16

### Tolerizing a Recipient and Transplantation with ECDI-Fixed Cells

[0463] Cells from a transplant donor will be fixed by ECDI and used to suppress immuno-rejection in a recipient. This example shows exemplary methods for tolerizing a transplant recipient with ECDI-fixed genetically modified cells. Human recipients in need of transplantation will be treated with ECDI fixed cells to tolerize the recipient to transplantation. The ECDI fixed cells will be genetically modified, for example, GGTA1 and CMAH will be knocked out. B4GALNT2 will also be knocked in some of the ECDI fixed cells. Some or all of the ECDI fixed cells will also express one or more genes that are ICP47, CD46, CD55, or CD59.

[0464] The ECDI fixed cells will be given to the recipient about 7 days before transplantation and again at about 1 day after transplantation.

[0465] A dose of an antagonistic anti-CD40 antibody will also be given to the recipient about 8 days before transplantation and 7 and 14 days after transplantation. The dose will be at least about 30 mg anti-CD40 antibody per kg recipient body weight.

[0466] The recipient will receive the transplant. The transplant will be cells, tissues, and/or organ from non-human animals, including but not limited to ungulates.

[0467] For example, islet cells will be extracted from unmodified ungulates and transplanted into human recipients suffering from diabetes. Because the recipient has been properly tolerized before transplantation, the human recipients will not reject the transplant.

### Example 17

### Treating Diabetes by Transplanting Porcine Islets in Monkeys Receiving Anti-CD40 Antibody Treatment

[0468] This example compared the effects of anti-CD40 antibody administered at different time points on immuno-rejection in monkeys transplanted porcine islets.

[0469] A control diabetic monkey was transplanted with non-genetically modified porcine islets (FIG. 22A). The monkey was given anti-CD40 antibody on the day of transplantation. Exogenous insulin (shown in gray bars) needed to maintain normal blood glucose level was reduced on the day of transplant and completely stopped on day 21. Blood glucose levels (shown in lines) became normal immediately after transplantation and continue to be normal despite discontinuation of insulin on day 21 in both monkeys. However, the blood glucose level went after day 100 and exogenous insulin is needed to maintain normal blood glucose level after day 125.

[0470] Porcine islets collected from wild-type pigs were transplanted to a diabetic monkey. After transplantation, a monkey was given anti-CD40 antibody treatment four times through day 14 after transplantation (FIG. 22B). Exogenous insulin (shown in gray bars) needed to maintain normal blood glucose level was reduced on the day of transplant and completely stopped on day 21. Blood glucose levels (shown in lines) became normal immediately after transplantation and continue to be normal despite discontinuation of insulin on day 21 in the monkey. The blood glucose level remained normal without exogenous insulin on day 250 (FIG. 22B) after transplantation.

### Example 18

### Immunotolerizing Diabetic Monkeys Transplanted with Monkey Islets by Antibodies and ECDI-Fixed Splenocytes

[0471] This example compared the effects of anti-CD40 antibodies and tolerizing vaccines on immuno-rejection to allografts in a monkey (ID #13CP7). The results showed both the anti-CD40 antibodies and tolerizing vaccines effectively reduced the immuno-rejection in the monkey transplanted with monkey islets.

[0472] A diabetic monkey was transplanted with monkey islets. The monkey was given an anti-CD40 antibody and rapamycin for 21 days starting from the day of transplantation. The monkey was given exogenous insulin up to 21 days after transplantation. After day 21, the monkey had normal blood glucose level in the morning (fasting), but high blood glucose level in the afternoon (FIG. 23A). FIG. 23B demonstrates serum porcine C-peptide levels (fasted, random, and stimulated) in the same recipient (ID #13CP7).

### Example 19

### Immunotolerizing Diabetic Monkeys Transplanted with Porcine Islets by α-CD40 Antibodies and CTLA4-Ig

[0473] Experiments in this example compared the effects of α-CD40 antibodies and CTLA4-Ig on maintaining immunosuppression induced by other drugs in monkeys transplanted with porcine islet cells. The results showed that the α-CD40 antibodies outperformed CTLA4-Ig in extending islet xenograft survival (Table 12).

[0474] Two groups of cynomolgus monkeys with streptozotocin-induced diabetes (MX-LISA-A (4 monkeys) and MX-LISA-B (3 monkeys)) were intraportally transplanted with non-genetically modified porcine islets. For monkeys in the MX-LISA-A group, immunosuppression was induced by an α-CD25 antibody, an α-CD40 antibody, sTNFR, and an α-IL-6R antibody, and maintained by CTLA4-Ig and Rapamycin. For monkeys in the MX-LISA-B group, immunosuppression was induced by an α-CD25 antibody, CTLA4-Ig, sTNFR, and an α-IL-6R antibody, and maintained by an α-CD40 antibody and Rapamycin. Longer islet xenograft survival was achieved when the immunosuppression was maintained by the α-CD40 antibody (the MX-LISA-B group) compared to the MX-LISA-A group (Table 12).

TABLE 12
Immunotolerizing diabetic monkeys transplanted with
porcine islets by α-CD40 antibodies and CTLA4-Ig.

| | | ECDI-fixed | | | Islet Xenograft |
|---|---|---|---|---|---|
| | | Donor | Immunosuppression | | Survival |
| Group | n | Splenocytes | Induction | Maintenance | (Days) |
| MX- | 4 | None | α-CD25 + | CTLA4-Ig + | 77, 126, 135, |
| LISA-A | | | α-CD40 + | Rapamycin | 363 |
| | | | sTNFR + | | |
| | | | α-IL-6R | | |
| MX- | 3 | None | α-CD25 + | α-CD40 + | ≧364, ≧365, |
| LISA-B | | | CTLA4-Ig + | Rapamycin | ≧365 |
| | | | sTNFR + | | |
| | | | α-IL-6R | | |

### Example 20

### Immunotolerizing Diabetic Monkeys Transplanted with Porcine Islets by α-CD40 Antibodies and ECDI-Fixed Donor Splenocytes

[0475] This example examined the effects of apoptotic splenocytes on immuno-rejection in monkeys transplanted with porcine islets. The results showed that the apoptotic splenocytes extended islet xenograft survival (Table 13).

[0476] Two groups of cynomolgus monkeys with streptozotocin-induced diabetes (MX-ECDI-Control (2 monkeys) and MX-ECDI-Vaccine (3 monkeys)) were intraportally transplanted with non-genetically modified porcine islets. All of the monkeys were given an α-CD20 antibody, an α-CD40 antibody, sTNFR, an α-IL-6R antibody, and rapamycin from the day of transplantation through day 21 after the transplantation. Monkeys in the MX-ECDI-Vaccine group were also given peritransplant intravenous infusions of 0.25×10⁹ per kg bodyweight apoptotic donor splenocytes 7 days before and 1 day after the transplantation. The splenocytes include those prepared from GGTA1 knockout pigs, and those infused under the cover of the αGal glycoconjugate GAS914, as described in Katapodis et al., J Clin Invest. 110(12):1869-187 (2002), which is incorporated by reference herein in its entirety. Prolonged islet xenograft survival was achieved in monkeys given apoptotic donor splenocytes under the cover of transient immunosuppression (MX-ECDI Vaccine) but not in recipients given transient immunosuppression only (MX-ECDI Control) (Table 13).

TABLE 13
Immunotolerizing diabetic monkeys transplanted with porcine islets
by α-CD40 antibodies and apoptotic donor spenocytes

| | | | | Islet |
|---|---|---|---|---|
| | | ECDI-fixed | Transient | Xenograft |
| | | Donor | Immuno- | Survival |
| Group | n | Splenocytes | suppression | (Days) |
| MX-ECDI- | 2 | None | α-CD40 + α-CD20 + | 32, 40 |
| Control | | | sTNFR + α-IL-6R + | |
| | | | Rapa Thru Day 21 | |
| MX-ECDI- | 3 | 0.25 × 10⁹ on | α-CD40 + α-CD20 + | 81, 100, |
| Vaccine | | days −7 and +1 | sTNFR + α-IL-6R + | 113 |
| | | | Rapa Thru Day 21 | |

### Example 21

### Suppression of Circulating Immune Cells Levels by ECDI-Fixed Donor Splenocytes and α-CD40 Antibodies

[0477] Experiments in this example examined ECDI-fixed cells (tolerizing vaccines) and α-CD40 antibodies on the level of circulating immune cells after transplantation. The levels of circulating immune cells were indicators of transplant rejection. The results showed that both ECDI-fixed cells (tolerizing vaccines) and α-CD40 antibodies decreased the levels of circulating immune cells in the recipients after transplantation.

[0478] The circulating immune cells tested here were CD8+ CD2hi CD28− effector memory T cells, CD4+CD25hi FoxP3+ CD127low regulatory T cells, and CD8+ CD122+ natural suppressor cells.

### CD8+ CD2hi CD28− Effector Memory T Cells

[0479] Cynomolgus monkeys were transplanted with porcine islets. No tolerizing vaccine was given to the monkeys. The level of circulating CD8+ CD2hi CD28− effector memory T cells was determined by flow cytometry (FIG. 24). The results showed that the level of circulating CD8+ CD2hi CD28− effector memory T cells in the monkeys undergoing transplantation (14GP04) was increased compared with baseline control (13CP04), and the CD8+ CD2hi CD28− effector memory T cells have high prevalence within the CD8+ T cell compartment in liver mononuclear cells at the time of sacrifice (FIG. 24).

[0480] Circulating CD8+ CD2hi CD28− effector memory T cells in the two groups of cynomolgus monkeys (MX-ECDI-control and MX-ECDI-vaccine) transplanted with porcine islets in Example 24 were measured by flow cytometry. Monkeys in the MX-ECDI-vaccine groups received peritransplant infusion of apoptotic donor splenocytes as a tolerizing vaccine. The level of circulating CD8+ CD2hi CD28− effector memory T cells was determined by flow cytometry (FIG. 25). Flow cytometry results show that the peritransplant infusion of apoptotic donor splenocytes (MX-ECDI-vaccine) reduced at least temporarily the posttransplant increase of circulating CD8+ CD2hi CD28− effector memory T cells in the cynomolgus monkeys compared with control recipients that did not receive tolerizing vaccination with apoptotic donor splenocytes (MX-ECDI-control). At the time of sacrifice (after presumed rejection), the percentage of CD8+ CD8+ CD2hi CD28− effector memory T cells within the CD8+ T cell compartment in liver mononuclear cells was comparably high in both groups of recipients (FIG. 25).

[0481] Circulating CD8+ CD2hi CD28− effector memory T cells in monkeys transplanted with porcine islets in Examples 28 (MX-LISA-A and MX-LISA-B) and Example 29 (MX-ECDI-control and MX-ECDI-vaccine) were measured by flow cytometry on the day of transplantation, day 7, day 50, and day 100 after transplantation. The level of circulating CD8+CD2hi CD28− effector memory T cells from naïve monkeys was used as a control.

[0482] Flow cytometry results show that the peritransplant infusion of apoptotic donor splenocytes (MX-ECDI vaccine) suppresses at least temporarily the posttransplant increase of circulating CD8+ CD2hi CD28− effector memory T cells in cynomolgus monkeys compared with control recipients that did not receive tolerizing vaccination with apoptotic donor splenocytes (MX-ECDI Control). The level of suppression of posttransplant increases in CD8+ effector memory T cells in MX-ECDI-vaccine recipients was comparable with the suppression in recipients that receive more potent and more prolonged immunosuppression after porcine islet xenotransplantation (the MX-LISA-A and MX-LISA-B groups) (FIG. 26).

### CD4+CD25hi FoxP3+ CD127low Regulatory T Cells

[0483] The experiments in this example examined ECDI-fixed cells (tolerizing vaccines) and α-CD40 antibodies on the level of circulating CD4+CD25hi FoxP3+ CD127low regulatory T cells after transplantation. The level of circulating CD4+CD25hi FoxP3+ CD127low regulatory T cells was an indicator of transplant rejection.

[0484] Circulating CD4+CD25hi FoxP3+ CD127low regulatory T cells in monkeys transplanted with porcine islets (MX-LISA-A, MX-LISA-B, MX-ECDI-control, and MX-ECDI-vaccine) were measured by flow cytometry on the day of transplantation, day 7, day 50, and day 100 after transplantation. The level of circulating CD4+CD25hi FoxP3+ CD127low regulatory T cells from naïve monkeys was used as a control.

[0485] Flow cytometry results show that the peritransplant infusion of apoptotic donor splenocytes (MX-ECDI-vaccine) promoted the increase in circulating CD4+CD25hi FoxP3+ CD127low regulatory T cells in cynomolgus monkeys compared with control recipients that did not receive tolerizing vaccination with apoptotic donor splenocytes (MX-ECDI-control). The posttransplant increase in these regulatory T cells in MX-ECDI-vaccine recipients was comparable with the increase in recipients that receive maintenance immunosuppression with anti-CD40 antibodies and rapamycin (MX-LISA-B) after porcine islet xenotransplantation (FIG. 27).

### CD8+ CD122+ Natural Suppressor Cells

[0486] Circulating CD8+ CD122+ natural suppressor cells in monkeys transplanted with porcine islets (MX-LISA-A, MX-LISA-B, MX-ECDI-control, and MX-ECDI-vaccine) were measured by flow cytometry on the day of transplantation, day 7, day 50, and day 100 after transplantation. The level of circulating CD8+ CD122+ Natural Suppressor Cells from naïve monkeys was used as a control.

[0487] Flow cytometry results showing that the peritransplant infusion of donor apoptotic splenocytes (MX-ECDI-vaccine) promoted the increase in circulating CD8+CD122+ natural suppressor cells in cynomolgus monkeys compared with control recipients that did not receive tolerizing vaccination with apoptotic donor splenocytes (MX-ECDI-control) and MX-LISA-A recipients. The posttransplant increased in these regulatory T cells in MX-ECDI-vaccine recipients is comparable with the increase in recipients that receive maintenance immunosuppression with anti-CD40 antibodies and rapamycin (MX-LISA-B) after porcine islet xenotransplantation (FIG. 28).

### Example 22

### Prolonging Pig Islet Xenograft Survival in Monkeys by ECDI-Fixed Cells, Rituximab, Anti-CD40 Ab 2C10 Antibody, sTNFR, Anti-IL-6R Antibody, and Rapamycin

[0488] This example shows exemplary methods for suppressing immuno-rejection using ECDI-fixed donor cells in combination with other immunosuppression drugs.

[0489] The tolerogenic efficacy of the novel, tripartite protocol including peritransplant i) antigen delivery on ECDI-fixed cells, ii) rapamycin, rituximab, sTNFR, and anti-IL-6R antibody, and iii) anti-CD40 Ab 2C10 will be studied in the setting of intraportal transplantation of adult pig islets in monkeys.

[0490] ECDI-fixed donor splenocytes will be prepared from freshly prepared, cytokine-mobilized splenic B cells from cloned porcine donors. About 0.25×10⁹/kg ECDI-fixed donor splenocytes will be administered via IV to the monkeys on day −7 (relative to same-donor islet transplant on day 0). Donor spleen will be freshly obtained from cloned porcine donors using splenectomy. Donor spleen B cells will be ex-vivo expanded and administered via IV infusion to the monkeys on day +1. Adult pig islet products (25,000 islet equivalents/kg) from cloned porcine donors, cultured for 7 days, and meeting all release criteria will be infused intraportally on day 0 via a portal venous vascular access port.

[0491] B cell depletion will be initiated with rituximab on day −10, i.e. prior to islet transplantation and also prior to the first infusion of ECDI-fixed donor cells. Four doses of 20 mg/kg will be administered via IV on day −10, −3, +5, and +12 to the monkeys. The monkeys will be administered rapamycin on day −7 through day 21 post-transplant with the 12 to 15 ng/ml target trough level. sTNFR will be subcutaneously administered on day −6 through day +10. Additionally, anti-IL-6R will be administered via IV on day −7, 0, 7, 14 and 21.

[0492] Monkeys will be tested to determine the efficacy of using pharmaceutically active agents together with ECDI-fixed donor cells in a xenotransplant animal model. Three doses of 50 mg/kg anti-CD40 Ab 2C10 will be administered to a monkey via IV on day −1, +7, and +14, while four doses of 50 mg/kg anti-CD40 Ab 2C10 will be administered to a different monkey via IV on day −8, −1, +7, and +14.

[0493] Post-transplant monitoring of graft functions, including daily am blood glucose (AM BG) and pm blood glucose (PM BG), weekly C-peptide, monthly HbA1c, and bi-monthly IVGTTs with determination of acute C-peptide responses to glucose and glucose disappearance rates, will be measured. Successful engraftment will be defined as maintenance of nonfasting BG<200 mg/dL on greatly reduced (≦33% of baseline) or no exogenous insulin. The primary efficacy outcome will be days to islet graft failure as defined as the first of 3 consecutive days (on stable low dose insulin or after discontinuation of insulin) with blood glucose levels ≧200 mg/dL.

[0494] The islet graft function post-transplant will be further demonstrated in the IV glucose tolerance test (IVGTT). A dose of glucose will be ingested by IV and blood levels are checked at intervals. Serum porcine C-peptide responses to IV glucose before and after diabetes induction (pre and post STZ) will also be measured. A response to IV glucose at day +28 will indicate the reversal of the induced diabetic condition.

### Example 23

### Reducing Immuno-Rejection in a Recipient by Transplanting Genetically Modified Transplant Grafts and Administering ECDI-Fixed Donor Cells

[0495] This example shows exemplary methods for suppression of immuno-rejection in a recipient receiving a transplant from a donor by i) administering ECDI-fixed donor cells; and ii) genetically modifying the donor so that the transplant will induce low or no immuno-rejection in the recipient.

[0496] A human recipient in need of transplantation is tolerized to the graft by treating the recipient with ECDI fixed cells. After tolerization, the recipient will receive a transplant. The transplant will be cells, tissues, and/or organ from non-human animals, including but not limited to ungulates. These non-human animals will be genetically modified non-human animals. The genetic modification will include at least NLRC5/TAP1 knockout. Other genes that will be knocked out are listed in Tables 1 and 2. Genes that will be overexpressed are listed in Tables 3 and 4.

[0497] For example, a human recipient with diabetes is transplanted with one or more NLRC5/TAP1 knockout islet cells overexpressing ICP47. The transplanted islet cells will overexpress a transgene coding a peptide homologous or identical to human ICP47. The islet cells will be from a genetically modified non-human animal, such as a pig.

[0498] Following the transplantation, the human recipient will have increased endogenous insulin levels and better glucose tolerance. When compared to a human recipient who is transplanted with wild-type islet cells, the human recipient transplanted with NLRC5 knockout islet cells overexpressing human ICP47 will have significantly reduced transplant rejection, thus requiring little to no immunosuppression therapy.

### Example 24

### Preventing Rejection or Extending Survival of Porcine Islet Xenografts in Human Recipients in the Clinical Setting in the Absence of Chronic and Generalized Immunosuppression of the Recipients

[0499] This example shows an exemplary approach to preventing rejection or extending survival of porcine islet (and/or other cell, tissue, and organ) xenografts in human recipients in the clinical setting in the absence of chronic and generalized immunosuppression of the xenograft recipient. This approach will include and integrate three components: i) genetically engineered porcine islets with deficient and/or reduced expression of αGal, MHC class I, complement C3, and CXCL10 as well as transgenic expression the HLA-G; ii) genetically engineered donor apoptotic and non-apoptotic mononuclear cells (e.g., splenocytes) with deficient/reduced expression of αGal, Neu5Gc, and Sda/CAD as well as transgenic expression of HLA-G with or without human CD47, human PD-L1, human PD-L2 (the genetically engineered vaccine); and iii) the administration of transient immunosuppression including antagonistic anti-CD40 mAb, anti-CD20 mAb, rapamycin and transient anti-inflammatory therapy including compstatin (e.g., the compstatin derivative APL-2), anti-IL-6 receptor mAb, and soluble TNF receptor.

[0500] Vaccine donor pigs comprising disrupted GGTA1, CMAH, and B4GalNT2 and transgenes expressing HLA-G (or HLA-E), human CD47, human PD-L1 and human PD-L2 will be generated. These vaccine donor pigs will provide mononuclear cells (e.g., splenocytes) with αGal-, Neu5Gc-, Sda/CAD-Deficiencies and expressing of HLA-G, human CD47, human PD-L1, and human PD-L2. Some of the mononuclear cells (e.g., splenocytes) will be made apoptotic by ECDI fixation. Apoptotic and non-apoptotic mononuclear cells (e.g., splenocytes) will be mixed to make tolerizing vaccines. The graft donor pigs will be made by further disrupting NLRC5 (or TAP1-), C3, and CXCL10 genes in the vaccine donor pigs. The graft donor pigs will provide cells, tissues or organs (e.g., islets) for transplant in a human recipient. The populations of vaccine donor pigs and graft donor pigs will be expanded by cloning, e.g., using somatic nuclear transfer.

[0501] A graft from the graft donor pigs will be transplanted to a recipient. Tolerizing vaccines from cells provided by the vaccine donor pigs will administered to the human recipient one day before and 7 days after transplant. Immunosuppression agents such as α-CD40 antibodies, α-CD20 antibodies and Rapamycin, and/or anti-inflammatory agents such as compstatin, α-IL-6R antibodies, and sTNFR will be administered from a time point before transplant through day 21 after transplant. This approach will prevent rejection or extending survival of porcine xenograft (e.g., porcine islets) in the human recipient in the absence of chronic and generalized immunosuppression of the recipient (FIG. 5).

### Example 25

### Generation and Characterization of GGTA1/NLRC5 Knockout Pigs

[0502] This example shows exemplary methods for generating knockout pigs. A knockout pig can have reduced protein expression of two or more of the following: NLRC5, TAP1, C3, CXCL10, MICA, MICB, CIITA, CMAH, GGTA1 and/or B4GALNT2. One of such knockout pig was a GGTA1/CMAH/NLRC5 knockout pig using CRISPR/cas9 system. The pigs provided islets for transplantation. Porcine islets with disrupted GGTA1/CMAH/NLRC5 had MHC class I deficiency and will induce low or no immuno-rejection when transplanted to a recipient.

### Transfection of Fetal Fibroblasts

[0503] The px330 plasmids expressing guide RNA targeting GGTA1, CMAH, and NLRC5 generated in Example 1 were transected in porcine fetal fibroblasts. Pig fetal fibroblasts were cultured in DMEM containing 5-10% serum, glutamine and penicillin/streptomycin. The fibroblasts were co-transfected with two or three plasmids expressing Cas9 and sgRNA targeting the GGTA1, CMAH or NLRC5 genes using Lipofectamine 3000 system (Life Technologies, Grand Island, N.Y.) according to the manufacturer's instructions.

### Counter-Selection of GGTA1 KO Cells

[0504] Four days after transfection, the transfected cells were harvested and labeled with isolectin B4 (IB4)-biotin. Cells expressing αGal were labeled with biotin conjugated IB4 and depleted by streptavidin coated Dynabeads (Life Technologies) in a magnetic field. The αGal deficient cells were selected from the supernatant. The cells were examined by microscopy. The cells containing no or very few bound beads after sorting were identified as negative cells.

### DNA Sequencing Analysis of the CRISPR/Cas9 Targeted GGTA1 and NLRC5 Genes

[0505] Genomic DNA from the IB4 counter-selected cells and cloned pig fetuses were extracted using Qiagen DNeasy Miniprep Kit. PCR was performed with GGTA1 and NLRC5 specific primer pairs as shown in Table 11. DNA polymerase, dNTPack (New England Biolabs) was used and PCR conditions for GGTA1 were based on annealing and melting temperature ideal for those primers. The PCR products were separated on 1% agarose gel, purified by Qiagen Gel Extraction Kit and sequenced by the Sanger method (DNA Sequencing Core Facility, University of Minnesota) with the specific sequencing primers as shown in Table 7.

### Somatic Cell Nuclear Transfer (SCNT)

[0506] SCNT was performed as described by Whitworth et al. Biology of Reproduction 91(3):78, 1-13, (2014). The SCNT was performed using in vitro matured oocytes (DeSoto Biosciences Inc., St. Seymour, Tenn.). Cumulus cells were removed from the oocytes by pipetting in 0.1% hyaluronidase. Only oocytes with normal morphology and a visible polar body were selected for SCNT. Oocytes were incubated in manipulation media (Ca-free NCSU-23 with 5% FBS) containing 5 μg/mL bisbenzimide and 7.5 μg/mL cytochalasin B for 15 min. Oocytes were enucleated by removing the first polar body plus metaphase II plate. A single cell was injected into each enucleated oocyte, fused, and activated simultaneously by two DC pulses of 180 V for 50 μsec (BTX cell electroporator, Harvard Apparatus, Hollison, Mass., USA) in 280 mM Mannitol, 0.1 mM CaCl₂, and 0.05 mM MgCl₂. Activated embryos were placed back in NCSU-23 medium with 0.4% bovine serum albumin (BSA) and cultured at 38.5° C., 5% CO₂ in a humidified atmosphere for less than 1 hour, and transferred into the surrogate pigs.

### Producing Genetically Modified Pigs Using Embryos

[0507] Embryos for transferring to the surrogate pigs were added to a petri dish filled with embryo transferring media. A 0.25 ml sterile straw for cell cryopreservation was also be used. Aspiration of embryos was performed at 25-35° C.

[0508] Aspiration of embryos was performed following this order: media layer-air layer-media layer-air layer-embryo layer-air layer-media layer-air layer-media layer. When the straw sterilized with EO gas was used, its interior was washed by repeating aspiration and dispensing of the medium for embryo transplantation 1-3 times, before aspiration of embryos. After the aspiration, the top end of straw was sealed by a plastic cap. To keep the aspirated and sealed straw sterile, a plastic pipette (Falcon, 2 ml) was cut in a slightly larger size than the straw, put therein, and sealed with a paraffin film. The temperature of the sealed straw was maintained using a portable incubator, until shortly before use.

[0509] Embryos and estrus-synchronized surrogate mothers were prepared. Transferring of embryos will be performed by exposing ovary through laparotomy of the surrogate mothers. After anesthetization, the mid-line of the abdominal region was incised to expose the uterus, ovary, oviduct, and fimbriae. The straw aspirating embryos were aseptically taken from the portable incubator, and inserted into the inlet of oviduct. The inserted straw was moved up to the ampullary-isthmic junction region. After the insertion procedure, the straw was cut at the air containing layer on the opposite using scissors. A 1 cc syringe was mounted on the cut end, and approximately 0.3 cc of air was injected to release the embryos and medium from the straw into the oviduct. At this time, 5 mm of the top end of a 0.2 ml yellow tip was cut off and used to connect the syringe and straw.

[0510] After the embryo transfer, the exposed uterus, ovary, oviduct, and fimbriae were put in the abdominal cavity, and the abdominal fascia was closed using an absorbable suture material. Then, the surgical site was cleaned with Betadine, and treated with antibiotics and anti-inflammatory and analgesic drugs. A pregnancy test of the surrogate mother transplanted with embryos was performed, followed by induction of delivery of non-human animals that successfully got pregnant.

### Pregnancy and Fetuses

[0511] Two litters of pig fetuses (7 from pregnancy 1 and 5 from pregnancy 2) were obtained. Fetuses were harvested at day 45 (pregnancy 1) or 43 (pregnancy 2) and processed for DNA and culture cell isolation. Tissue fragments and cells were plated in culture media for 2 days to allow fetal cells to adhere and grow. Wild type cells (fetal cells not genetically modified) and fetal cells from pregnancy 1 or 2 were removed from culture plates and labeled with IB4 lectin conjugated to alexa fluor 488 or anti-porcine MHC class I antibody conjugated to FITC. Flow cytometric analysis was performed and data shown in FIGS. 32A-32C: Pregnancy 1 or FIGS. 32D-32E: Pregnancy 2. The histogram for the WT cells are included in each panel to highlight the decrease in overall intensity of each group of fetal cells. Of specific interested is the decrease in alpha Gal and MHC class I labeling in pregnancy 1 indicated as a decrease in peak intensity. In pregnancy 2 fetus 1 and 3 have a large decrease in alpha gal labeling and significant reduction in MHC class 1 labeling as compared to WT fetal cells.

### Genotypes of the Fetuses

[0512] DNA from fetal cells was subjected to PCR amplification of the GGTA1 (compared to Sus scrofa breed mixed chromosome 1, Sscrofa10.2 NCBI Reference Sequence: NC 010443.4) or NLRC5 (consensus sequence) target regions and the resulting amplicons were separated on 1% agarose gels (FIGS. 29A, 29B, 30A, and 30B). Amplicons were also analyzed by sanger sequencing using the forward primer alone from each reaction. The results are shown as Pregnancy 1 fetuses 1, 2, 4, 5, 6, and 7 truncated 6 nucleotides after the target site for GGTA1. Fetus 3 was truncated 17 nucleotides after the cut site followed by a 2,511 (668-3179) nucleotide deletion followed by a single base substitution. Truncation, deletion and substitution from a single sequencing experiment containing the alleles from both copies of the target gene can only suggest a gene modification has occurred but not reveal the exact sequence for each allele. From this analysis it appears that all 7 fetuses contained a single allele modification. Sequence analysis of the NLRC5 target site for fetuses from pregnancy 1 was unable to show consistent alignment suggesting an unknown complication in the sequencing reaction or varying DNA modifications between NLRC5 alleles that complicate the sanger sequencing reaction and analysis. Pregnancy 2 fetal DNA samples 1, 3, 4, and 5 were truncated 3 nucleotides from the GGTA1 gene target site. Fetus 2 had variability in sanger sequencing that suggests a complex variability in DNA mutations or poor sample quality. However, fetal DNA template quality was sufficient for the generation of the GGTA1 gene screening experiment described above. NLRC5 gene amplicons were all truncated 120 nucleotides downstream of the NLRC5 gene cut site.

[0513] Fetal DNA (from wild type (WT) controls, and fetuses 1-7 from pregnancy 1) was isolated from hind limb biopsies and the target genes NLRC5 and GGTA were amplified by PCR. PCR products were separated on 1% agarose gels and visualized by fluorescent DNA stain. The amplicon bands in the WT lane represent unmodified DNA sequence. An increase or decrease in size of an amplicon suggested an insertion or deletion within the amplicon, respectively. Variations in the DNA modification between alleles in one sample might make the band appear more diffuse. Minor variations in the DNA modification were possible to resolve by a 1% agarose gel. The results are shown in FIGS. 31A-31B. A lack of band as in the NLRC5 gel (fetuses 1, 3, and 4 of Pregnancy 1; FIG. 31A bottom) suggested that the modification to the target regions was disrupted the binding of DNA amplification primers. The presence of all bands in GGTA1 targeting experiment suggests that DNA quality was sufficient to generate DNA amplicons in the NLRC5 targeting PCR reactions. Fetuses 1, 2, 4, and 5 of Pregnancy 1 (FIG. 31A, top) had larger GGTA1 amplicons, suggesting an insertion within the targeted area. For fetus 3 of Pregnancy 1 (FIG. 31A, top), the GGTA1 amplicon migrated faster than the WT control, suggesting a deletion within the targeted area. For fetuses 6 and 7 of Pregnancy 1 (FIG. 31A, bottom), the NLRC5 amplicons migrated faster than the WT, suggesting a deletion with in the target area. Fetuses 1-5 of Pregnancy 2, (FIG. 31B, top) GGTA1 amplicons were difficult to interpret by size and were diffuse as compared to the WT control. Fetuses 1-5 (FIG. 31B, bottom) NLRC5 amplicons were uniform in size and density as compared to the wild type control.

[0514] Given the variation in phenotypic results for the alpha Gal and MHC class 1 flow cytometric labeling there is considerable variation in the bi-allelic mutations in the GGTA1 and NLRC5 genes. This observation is supported by differences in band size in the agarose gels, truncated gene products, and sequencing challenges FIGS. 29A-29B, 30A-30B, 31A-31B, and 32A-32E. Cloning of individual alleles will be performed to fully decipher the sequence modifications. However, the phenotypic, DNA sequencing, and functional analysis of fetuses support the creation of biallelic GGTA1 and NLRC5 gene modifications in fetal pigs.

### Impact of Gene Knockout on Proliferation of Human Immune Cells

[0515] Next, with cells from fetus 3 of pregnancy 1, co-culture assays were performed to evaluate the impact of decreased MHC class I expression on proliferation of human immune cells.

### Mixed Lymphocyte Reaction (MLR)

[0516] Co-cultures were carried out in flat-bottom, 96-well plates. Human PBMCs labeled with Carboxyfluorescein succinimidyl ester (CFSE) (2.5 μM/ml), were used as responders at 0.3-0.9×10⁵ cells/well. Wild type or Porcine fibroblasts at 0.1-0.3×10⁵ cells/well (from wild type pigs or the GGTA1/NLRC5 knockout fetuses) were used as stimulators at stimulator-responder ratios of 1:1, 1:5 and 1:10. MLR co-cultures were carried out for 4 days in all MLR assays. In another parallel experiment, total PBMCs cells were stimulated with phytohaemagglutinin (PHA) (2 ug/ml) as positive control.

[0517] Cultured cells were washed and stained with anti-CD3 antibody, anti-CD4 antibody and anti-CD8 antibody followed by formaldehyde fixation and washed. BD FACS Canto II flow cytometer was used to assess the proliferative capacity of CD8+ and CD4+ T cells in response to fibroblasts from the GGTA1/NLRC5 knockout fetus compared to unmodified porcine fibroblast cells. Data were analyzed using FACS diva/Flow Jo software (Tri star, San Diego, Calif., USA), and percentage CFSE dim/low was determined on pre gated CD8 T cells and CD4 T cells.

[0518] The proliferative response of human CD8+ cells and CD4+ T cells to wild type and GGTA1/NLRC5 knockout fetal cells are shown in FIGS. 33A-33C. Cells were gated as CD4+ or CD8+ before assessment of proliferation (FIG. 33A). CD8 T cell proliferation was reduced following treatments stimulation by fetal cells with GGTA1/NLRC5 knockout fibroblasts compared to wild type fetal cells. Almost 55% reduction in CD8+ T cells proliferation was observed when the human responders were treated with GGTA1/NLRC5 knockout fetal cells at 1:1 ratio (FIG. 33B). Wild type fetal cells elicited 17.2% proliferation in human CD8+ T cells whereas the GGTA1/NLRC5 knockout fetal cells from fetus 3 (pregnancy 1) induced only 7.6% proliferation (FIG. 33B). No differences were observed in CD8+ T cells proliferative response at 1:5 and 1:10 ratio compared to the wild type fetal cells (FIG. 33B). No changes were observed in CD4+ T cell proliferation in response to GGTA1/NLRC5 knockout compared to the wild type fetal cells (FIG. 33C).

[0519] While some embodiments have been shown and described herein, such embodiments are provided by way of example only. Numerous variations, changes, and substitutions will now occur to those skilled in the art without departing from the invention. It should be understood that various alternatives to the embodiments of the invention described herein will be employed in practicing the invention.

1. A genetically modified animal with reduced protein expression of one or more first genes, wherein said genetically modified animal is a member of the Laurasiatheria superorder or is a non-human primate, and wherein said one or more first genes comprise:
a) a component of a major histocompatibility complex (MHC) I-specific enhanceosome,
b) a transporter of an WIC I-binding peptide, or
c) complement component 3 (C3),
wherein said reduced protein expression is in comparison to a non-genetically modified counterpart animal.

2. The genetically modified animal of claim 1, comprising a member of the Laurasiatheria superorder, wherein said member of the Laurasiatheria super order is an ungulate.

3. The genetically modified animal of claim 2, wherein said ungulate is a pig.

4.-5. (canceled)

6. The genetically modified animal of claim 1, wherein said genetically modified animal has reduced protein expression of two or more said first genes.

7. The genetically modified animal of claim 1 comprising reduced protein expression of a component of a WIC I-specific enhanceosome, wherein said component of a WIC I-specific enhanceosome is NOD-like receptor family CARD domain containing 5 (NLRC5).

8. The genetically modified animal of claim 1, comprising reduced protein expression of a transporter of a MHC I-binding peptide, wherein said transporter is transporter associated with antigen processing 1 (TAP1).

9. The genetically modified animal of claim 1, comprising reduced protein expression of C3.

10. (canceled)

11. The genetically modified animal of claim 1, further comprising reduced protein expression of one or more second genes, wherein said one or more second genes comprise:
a) a natural killer (NK) group 2D ligand,
b) an endogenous gene not expressed in a human,
c) a CXC chemokine receptor (CXCR)3 ligand, or
d) MHC II transactivator (CIITA),
wherein said reduced protein expression is in comparison to a non-genetically modified counterpart animal.

12.-13. (canceled)

14. The genetically modified animal of claim 11, further comprising reduced protein expression of an NK group 2D ligand, wherein said NK group 2D ligand is MHC class I polypeptide-related sequence A (MICA) or MHC class I polypeptide-related sequence B (MICB).

15. The genetically modified animal of claim 11, further comprising reduced protein expression of an endogenous gene not expressed in a human.

16. The genetically modified animal of claim 11, further comprising reduced protein expression of a CXCR3 ligand, wherein said CXCR3 ligand is C-X-C motif chemokine 10 (CXCL10).

17. The genetically modified animal of claim 1, further comprising one or more exogenous polynucleotides encoding one or more proteins or functional fragments thereof, wherein said one or more proteins comprise:
a) an MHC I formation suppressor,
b) a regulator of complement activation,
c) an inhibitory ligand for NK cells,
d) a B7 family member,
e) CD47,
f) a serine protease inhibitor, or
g) galectin.

18. (canceled)

19. The genetically modified animal of claim 17, comprising one or more exogenous polynucleotides encoding an MHC I formation suppressor, wherein said MHC I formation suppressor is infected cell protein 47 (ICP47).

20. The genetically modified animal of claim 17, comprising one or more exogenous polynucleotides encoding a regulator of complement activation, wherein said regulator of complement activation is cluster of differentiation 46 (CD46), cluster of differentiation 55 (CD55), or cluster of differentiation 59 (CD59).

21. The genetically modified animal of claim 17, comprising one or more exogenous polynucleotides encoding an inhibitory ligand for NK cells, wherein said inhibitory ligands for NK cells is leukocyte antigen E (HLA-E), human leukocyte antigen G (HLA-G), or β-2-microglobulin (B2M).

22.-23. (canceled)

24. The genetically modified animal of claim 17, comprising one or more exogenous polynucleotides encoding a B7 family member, wherein said B7 family member is a programmed death-ligand.

25.-26. (canceled)

27. The genetically modified animal of claim 17, comprising one or more exogenous polynucleotides encoding a serine protease inhibitor, wherein said serine protease inhibitor is serine protease inhibitor 9 (Spi9).

28. The genetically modified animal of claim 17, comprising one or more exogenous polynucleotides encoding a galectin, wherein said galectin is galectin-9.

29.-35. (canceled)

36. A genetically modified animal that is a member of the Laurasiatheria superorder or is a non-human primate comprising:
a) an exogenous polynucleotide encoding an inhibitory ligand for an NK cell or a functional fragment thereof, and
b) reduced protein expression of an endogenous gene not expressed in a human, wherein said reduced protein expression is in comparison to a non-genetically modified counterpart animal.

37. The genetically modified animal of claim 36, wherein said inhibitory ligand for an NK cell is HLA-E or HLA-G.

38.-40. (canceled)

41. The genetically modified animal of claim 36, wherein said endogenous gene not expressed in a human is GGTA1, CMAH, or B4GALNT2.

42. The genetically modified animal of claim 36, further comprising exogenous polynucleotides encoding:
a) PD-L1 or a functional fragment thereof,
b) PD-L2 or a functional fragment thereof,
c) CD47 or a functional fragment thereof, or
d) any combination thereof.

43.-46. (canceled)

47. A population of genetically modified animals comprising two or more animals of claim 1.

48.-49. (canceled)

50. A pancreas or pancreatic islet isolated from said genetically modified animal of claim 1.

51. (canceled)

52. A genetically modified cell from a member of the Laurasiatheria superorder or a non-human primate, comprising reduced protein expression of one or more first genes, wherein said one or more first genes comprise:
a) a component of a MHC I-specific enhanceosome,
b) a transporter of a MHC I-binding peptide, or
c) C3,
wherein said reduced protein expression is in comparison to a non-genetically modified counterpart cell.

53.-78. (canceled)

79. A genetically modified cell from a member of the Laurasiatheria superorder or a non-human primate, comprising:
a) an exogenous polynucleotide encoding an inhibitory ligand for an NK cell or a functional fragment thereof, and
b) reduced protein expression of an endogenous gene not expressed in a human, wherein said reduced protein expression is in comparison to a non-genetically modified counterpart cell.

80.-109. (canceled)

110. A method for treating a condition in a subject in need thereof comprising:
a) administering a tolerizing vaccine to said subject; and
b) transplanting a genetically modified cell, tissue, or organ to said subject to treat said condition.

111. The method of claim 110, further comprising administering to said subject one or more pharmaceutical agents that inhibits T cell activation, B cell activation, dendritic cell activation, or any combination thereof.

112.-121. (canceled)

122. The method of claim 110, wherein said pharmaceutical agent comprises an anti-CD40 antibody.

123.-145. (canceled)

146. A method for making a genetically modified animal, comprising:
a) obtaining a first cell with reduced expression of one or more of a component of a MHC I-specific enhanceosome, a transporter of a MHC I-binding peptide, C3, or any combination thereof;
b) transferring a nucleus of said first cell to a second cell to generate an embryo; and
c) growing said embryo to said genetically modified animal.

147.-148. (canceled)

149. The genetically modified animal of claim 15, wherein said endogenous gene not expressed in a human is glycoprotein galactosyltransferase alpha 1,3 (GGTA1), putative cytidine monophosphate-N-acetylneuraminic acid hydroxylase-like protein (CMAH), or β1,4 N-acetylgalactosaminyltransferase (B4GALNT2).

150. A genetically modified animal that is a member of the Laurasiatheria superorder or is a non-human primate, comprising:
a) reduced protein expression of a component of a major histocompatibility complex,
b) one or more of:
i) an exogenous polynucleotide encoding an inhibitory ligand for an NK cell or a functional fragment thereof, and
ii) reduced protein expression of an endogenous gene not expressed in a human, wherein said reduced protein expression is in comparison to a non-genetically modified counterpart animal.

The application's sequence listing, which the Patent Office published only in electronic form, follows.

SEQUENCE LISTING (198 sequences)

SEQ ID NO: 1 - DNA, 20 bp, Artificial Sequence
  Description of Artificial Sequence: Synthetic primer
gctgtggcatatggcagttc

SEQ ID NO: 2 - DNA, 19 bp, Artificial Sequence
  Description of Artificial Sequence: Synthetic primer
tccatgtataagtctttta

SEQ ID NO: 3 - DNA, 20 bp, Artificial Sequence
  Description of Artificial Sequence: Synthetic primer
ggcaatgccagatcctcaac

SEQ ID NO: 4 - DNA, 20 bp, Artificial Sequence
  Description of Artificial Sequence: Synthetic primer
tgtctgatgtctttctcatg

SEQ ID NO: 5 - DNA, 2662 bp, Sus scrofa
  modified_base (616)..(715): a, c, t, g, unknown or other
  modified_base (800)..(899): a, c, t, g, unknown or other
  modified_base (1792)..(1792): a, c, t, g, unknown or other
tggaaacaacatgaacactgtgagctcccgggagttcagtcagatccactgaggtagtggccgggtccagcggccttgcctaacttggcagtccccacccgctgcatccttagatctggctttgtcccttacacaggacagcccaggcctgtgatccccaaggtcaggctaacgctacctggacctgggctctaagacctgggaagctacaggaggggtgagccagttcccagattgggaaaactgaggcttgaggcgagaggatagtcatccacaagcctcgtggctaaatccctggcttggcccagggccctggacctcaggccactgggctgatcagtgcttgtatgctttcctcatcgcacttgtttggaagacattccctggtttagctgctctgggatggtaatctataaatacatactttgtttaaaaaattaataaattaaatcttggaccagcatgagggcatctggccagccacatggcatatgacatggacatttgccacgtctcaaatatggactgcccatcacatgtagtgctaggacccatgccaacaacccacaggccacactgcaggtttcatgcaatgtcacatggaacgctgccacgnnnnnnnnnnnnnnnnnnnnnnnnnnnnnnnnnnnnnnnnnnnnnnnnnnnnnnnnnnnnnnnnnnnnnnnnnnnnnnnnnnnnnnnnnnnnnnnnnnnntcacgccacgacatcctcactgtgctgcatattcccgactggtcatgcatgtcatgtgtgatggagggtggtctgttggccatannnnnnnnnnnnnnnnnnnnnnnnnnnnnnnnnnnnnnnnnnnnnnnnnnnnnnnnnnnnnnnnnnnnnnnnnnnnnnnnnnnnnnnnnnnnnnnnnnnntctgaagaccgtgcctggaaaacggcgtctctccctcccggaacagtgtgccgggacagccagctgaggctcttttcctgagccctctatcctgggggatggaagcggacatcacttggctgtattggaagggtcttgcgggggccgtcaagcatcccaggggacctgtggctgatggtcgaagaaagcaaagtccagcctgggctcccggctctgcagatgctgggccgtgtcctgggggatggggttattccacaggctgcggggcacagagacagacattcagcactgggagctgttcacttgtccttgtctctaccctctgtccaacccacagatggggaaactgaggccccaaaggggaagagctgttcccagagttacctggcaggtaggagcaggtgttagaccagcatggctaccttagggagatggtatcccccatgcccaccccaacttcttccactcactcttcttccctggaagctagtgatgccagctgggccatgctcatatgacacattgtgcaaataaggagaaagcccccccctttatttctttttgttttttttttttttaccatttcttgggccgctcccgcggcatatggagattcccaggctaggggtcgaatcggagctgtagccgccagcctacgccagagccacagcaactcgggatccgagctgcatctgcgacctgcaccacagctcatggcaacgccggatcgttaacccactgagcagggccagggatcgaacccgcaacctcatggttcctagttggattcattaaccactgtgccacgatgggaactctgaaagctccccctttttagacactttatttctatcttctgaaactgtcatactgagttttatagagcgagaccnccccctttttaagacactttatttctatcttctgaaactgtcgtaatatactgagttttatagagcgagacccttcactactaccagaaacctaacacgtcaacggtgtgaacagtgtcctttagatgcaaggccttggtacagtgtgcagcctgtgcaactgtacgtggtggctgtgattacagttatcattttaagcacttgctatgtgccaggcattgtactcagtgctttgtagaatcatttagtctgcagagcgcccatctaaggctgatatgatcattgtctccagtttacaaatgaggaaaccgaggttcagggaggttgagttactgaggcaaagttacacagtcagcaaccagtagagctgggatttgatccaggtctgctggctgccacattcctggtggagtgggccaaatctcctttgataatccccaatccaggagttcctgttgtggcgcagcagaaatgaatccgactagtaaccataaggttgcaggttcaatccctggtcttgctcagtgggttaaggatctggcgttgctatgagctgtggtgtaggttgaagatgcacctcagatcccacaatgctgtggctatggcgtaggctggcggatgtagctctgattggacccctagcctgggaatctccatatgctgcaggtgcggccctaaaaaagcaataaataagtaaatagataaccctcaacccaggtcctgcctcctcctacagaaagttcctttgcattgtagaggctgctgtggcccccacctcccaccatcctcgcccctgcaagtcctgttaccgaatgacttggatgccagagccctgagccagcccttcagccaggagccaggctccatgag

SEQ ID NO: 6 - DNA, 6638 bp, Sus scrofa
gggcctgtcctatggaaagaacctgcaagtccagcacaggggcttggccgggaacccatgagaccccctctggggacatcctaggacatctgtgatgaatcaggaagcagggctggctcctcatggaccccattagtcgccacctgggcaccaagaacctgtggggatggctcgtgaggctgctctgcaaacactcagaatggctgagtgccaaggtgaagttcttcctccccaacatggacctgggtgccaggaacgaggcctcagaccccacacagagggtcgtcctacaactcagaaaactgcgtacccagagtcagatcacctggcaggcgttcatccactgtgtgtgcatggagctggacgtgccgctggacctggaggtactgctgctgagcacctggggccacggagaagggctccccagtcagctggaagctgatgaggagcacccacctgagtctcagccccactctggcctcaagcggccacatcagagctgtgggccctcccctcgcccaaagcagtgcaggaagcagcagcgagaactggccaagaggtacctgcagctgctgagaacgtttgcccagcagcgttacgacagcaggagccctgggccaggacagccggtcgcctgccaccgaacctacatcccgcccatcttgcaatggaaccgagcctctgtgcccttcgacactcaggaggggactgttgcagggggccccaaggcagaagatggcacggatgtgagcattcgggacctcttcagtgccaaagccaacaagggcccgagagtcacggtgcttctgggaaaggcgggcatgggcaagaccacgctggcccaccggctctgccaagagtgggccgatggtcagctggagcgcttccaggccctgttccttttcgaattccgccagctcaacctgatcacaaacttcctgatgctgccacagctcctttttgatctgtacctgaggcccgaggcgggcccagaggcagtcttccagtacctggaggagaatgctaataaaatcctgctcatctttgatgggctggacgaggtcctccaccccggctccagcaaggaggctgcagatcctgaggcctcggcgtcagccctcaccctcttctcccgcctctgccatgggaccctcctgcccggctgctgggtcatgaccacctcccgtccagggaagctgcccgcctgcctgcccacagaggtggtcacggtcagcatgtggggctttgacggaccacgggtggaggagtacgtgagccgcttcttcagcgaccagccagtccaggaggcggccctcgcggagctgcgggccagctggcatctctggagcatgtgtgtggtgcccgcgctgtgccaggtcgcctgcctctgcctccaccatctgctcccaggccgctctccaggccagtctgcagccctcctgcccaccgtgacccagagctacgtgcagatggtgctttccctcagcccccaagggttcctgcctgccgagtccctgatgggcctcggggaggtggccctgtggggcctggagacggggaaggttgtcttcactgcaggagacatccctccacccacgatggccttcgcggcggccctcggcctgctcacctccttctgtgtgtacacggaacccgggcaccaggagacaggctacgtcttcacccacctcagcctgcagcagtttttggctgccctgcacctgatggccagccccaaggtggacagagacacacttgcccaacatgtcaccctcaattctcgctgggtgctgcggaccaaagctaggctgggcctcttagaccaccaccttcccacctttctggccggcctggcctcctgcgcctgccaccccttcctcacacccctggcacagcaggaggaggtgtgggtgcgtgccaggcaggcggcagtcatgcaagccttggagaagttggccactcgcaagctgacggggccaaagctgatagagctatgtcactgcgtggctgagacacagaagccggagctggccagcctcgtggcccagagcctcccccatcacctctccttccgcaactttctgctgacctatgccgacctggctgccctgaccaacatcctcgggcacagggatgcccccatccacctggattttgagggctgccccttggagccacactgtcctgaagccctggcaggctgcgagcaggtggagaatctcagctttaagagcaggaagtgtggggatgcctttgctgaagccctctccaggagtttgccaacaatggggagcctgaagaagctggggttgtcaggaagtaggatcactgcccgaggcatcagccacctggtgcgggctttgcccctctgtccacagctggaagaggtcagctttcaggacaaccagctcaaggacggggaggtcctgaacatcgtggaaatacttccccacctgccgcagctccggatgcttgacctgagccgcaacagtgtctccgtgtcaactctcctctccttgacaaaggtggcagtcacgtaccctaccattaggaagctgcaggtcagggagacagacctcgtcttccttctctccccacctacagagatgaccacagagctacaaagagacccagacctacaggaaaatgccagccagaggaaagaggctcagaggagaagcctggagctcaggctccagaagtgtcagctcagtgtctatgatgtgaagctgctcctcgcccagctccggatgggtccacagctggatgaagtggacctctcagggaaccagctggaagatgaaggctgtcaactggtggcagaggctgcgccccagctgcacattgccaggaagctggacctcagcgacaatgggctttctgtggctgggatgcaacgtgtgctgagtgcagtgagaacctgccggaccctggcagagctacacatcagtctgctgcacaaaaccgtggtgctcatgtttgccccagaaccagaggagcaggaggggatccagaagaggctgacacattgtggcctgcaagcccagcaccttgagcagctctgcaaagcgctgggaggaagttgccacctcaagtacctcgatttatcaggcaatgctctgggggacgaaggtgtggccctgctggctcagctgctccccgggcttggtgccctgcagctgctgaacctcagtgagaacggtttgtccctggatgctgtgttcagtttgacccagtgcttctctacagtgcggtggcttcagcgcttggacttcagctctgagagccagcacgtcatcctgagcggtgacagcagaggcaggcatctcttggctggcggatctttgccagagtttcaagctggagcccagttcttggggttccgtcagcgccgcatccccaggagcttctgcctcaaggagtgtcagctggagcccccgagcctctcccgcctctgtgagactctggagaagtgcccggggcctctggaagtcgaattgttctgcaaggtcctgagtgaccagagcctggagaccctgctgcatcaccttccccggctcccccaactaagcctgctgcagctgagccagacgggactgtcccaaaggagccccctcctgctggccgacctcttcagcctgtacccacgggttcagaaggtggatctcaggtccctccatcacatgactctgcacttcaggtttagcgaggagcaggaaggcggatgctgtggcaggttcacaggctgtggcctcagccaggagcacatggagccgctgtgttggtcgctgagcaagtgtgaggacctcagccaactggacctctccgccaacctgctgggtgatgacgggctcaggtccctcctggaatgtctccctcaggtgcccatctccggttcgcttgatctgagtcacaacggcatctctcaggaaagtgccctccgcctggtggaaacccttccctcctgcccacgtgtccgggaggcctcggtgaacccgggctccaagcagaccttctggattcacttctcccgaaaggaggaggctaggaagacactaaggctgagtgagtgcagcttcaggccagagcacgtgcccagactggccaccggcctgagccaggccctgcagctgacagagctcacgttgaaccagggctgcctgggcctggagcagctgactatcctcctgggcctgctgaagtggccggcggggctgctgactctcagggtagaggagccgtgggtgggcagagccggagtgctcaccctgctggaagtccgtgcccacgcctcaggcaacgtcactgaaataagcatctctgagacccaggagcagctctgtatgcagctggaatttccccatcaggagaacccagaagccgtggccctcaggttggctcattgtgatctcgggacccaccacagcctccttgtcagggagctaatggagacatgcgccaggctgcggcagctcagcttgtcccaggtgaagctctgcaaggccagctctctgctgctgcaaagcctcctgctgtccctctctgagctgaagaacttccggctgacctccagctgtgtgagctctgatgggctagcccacctgacatttggtctgagccattgtcaccacctggaggagctggacttgtctaacaatcaatttggcaaggaggacaccaaggtgctgatgggagcccttgagggcaaatgctggctgaagaggcttgacctcagccacttgcctctgagcagctccaccctggccgcgctcattcaaggactgagccacatgagcctcctgcagagcctccgtctaagcaggagcggcgttgatgacatcggctgctgccacctctccgaggcgctcagagctgccaccagcttggtggagctgggcttgagccacaaccagatcggagacgccggtgcccagcacttagctgccatcctgccagggctgcctgagctcaggaagatagacctctcagccaatggcatcggcccggcagggggagtgcggttggcggagtccctcaccctttgcgagcacctggaggagctgatgcttgactacaatgctctgggagatctcacagccctggggctggcccgagggttgcctcagcacctgagggtcctgcacctgcggtccagccacctgggcccagagggggcgctgagcctgggccaggcactggatggatgcccatacgtggaagagatcaacttggccgagaacagcctggctggagggatcccacatttctgtcaggggctcccgatgctccggcagatagacctgatgtcatgtgagattgacaaccagactgccaagcccctcgccgccagcttcgtgctctgcccagccctggaagaaatcatgctgtcctggaatctgctcggtgacgaggcagctgctgagctggcccaggtcctgccgcggatgggccgactgaagagagtggacctggagaagaatcggatcacagctcacggagcctggctcctggctgaagggctggctcagggctctggcatccaagtcattcgcctgtggaataaccccatcccccaggacacggcccagcatctgcagagccgggagcccaggctggactttgctttcttcgaccatcagccacaggtcccctgggatgcttgacggcccccgcaagacccttccaatacagccaagtgatgtccgcttccatcccccaggatagagggctcaggaaaagagcctcagctggctgtcccggcacactgttccgggagggagagacgccgttttccaggcacggtcttcagaatggactttatgggcgacaaagagcctaccatggccaacagaccaccctccatcacacatgacatgcatgaccagtcgggaatatgcagcacagtgaggatgtcgtggcgtgatgcaagacacagaaggttgcacgtggcagcgttccatgtgacattgcatgaaacctgcagtgtggcctgtgggttgttggcgtgggtcctagcactacatgtgatgggcagtccatatttgagacgtggcaaatgtccgtgtcatatgccatgtggctggccagatgccctcatgctggtccaagatttaatttattaattttttaaacaaagtatgtatttatagattacctttccagagcagctaaaccagggaatgtcttccaaacaagtgcgatgaggaaagcatacaagcactgatcagcccagtggcctgaggtccagggccctgggccaagccagggatttagccacgaggcttgtggatgactatcctctcgcctcaagcctcagttttcccaatctgggaactggctcacccctcccgtagcttcccaggtcttagagcccaggtccaggtagcgttagcctgaccttggggatcacaggcctgggctgtcctgtgtaagggacaaagccagatctaaggatgcagcgggtggggactgccaagttaggcaaggccgctggacccggccactacctcagtggatctgactgaactcccgggagctcacagtgttcatgttgtttccaagaaggcccaaggattgtgagccaagtttgatcaataaatgtgagtgatcttccggcctctaaaaaaaaaaaaaaaaaa

SEQ ID NO: 7 - protein, 1846 aa, Sus scrofa
MDPISRHLGTKNLWGWLVRLLCKHSEWLSAKVKFFLPNMDLGARNEASDPTQRVVLQLRKLRTQSQITWQAFIHCVCMELDVPLDLEVLLLSTWGHGEGLPSQLEADEEHPPESQPHSGLKRPHQSCGPSPRPKQCRKQQRELAKRYLQLLRTFAQQRYDSRSPGPGQPVACHRTYIPPILQWNRASVPFDTQEGTVAGGPKAEDGTDVSIRDLFSAKANKGPRVTVLLGKAGMGKTTLAHRLCQEWADGQLERFQALFLFEFRQLNLITNFLMLPQLLFDLYLRPEAGPEAVFQYLEENANKILLIFDGLDEVLHPGSSKEAADPEASASALTLFSRLCHGTLLPGCWVMTTSRPGKLPACLPTEVVTVSMWGFDGPRVEEYVSRFFSDQPVQEAALAELRASWHLWSMCVVPALCQVACLCLHHLLPGRSPGQSAALLPTVTQSYVQMVLSLSPQGFLPAESLMGLGEVALWGLETGKVVFTAGDIPPPTMAFAAALGLLTSFCVYTEPGHQETGYVFTHLSLQQFLAALHLMASPKVDRDTLAQHVTLNSRWVLRTKARLGLLDHHLPTFLAGLASCACHPFLTPLAQQEEVWVRARQAAVMQALEKLATRKLTGPKLIELCHCVAETQKPELASLVAQSLPHHLSFRNFLLTYADLAALTNILGHRDAPIHLDFEGCPLEPHCPEALAGCEQVENLSFKSRKCGDAFAEALSRSLPTMGSLKKLGLSGSRITARGISHLVRALPLCPQLEEVSFQDNQLKDGEVLNIVEILPHLPQLRMLDLSRNSVSVSTLLSLTKVAVTYPTIRKLQVRETDLVFLLSPPTEMTTELQRDPDLQENASQRKEAQRRSLELRLQKCQLSVYDVKLLLAQLRMGPQLDEVDLSGNQLEDEGCQLVAEAAPQLHIARKLDLSDNGLSVAGMQRVLSAVRTCRTLAELHISLLHKTVVLMFAPEPEEQEGIQKRLTHCGLQAQHLEQLCKALGGSCHLKYLDLSGNALGDEGVALLAQLLPGLGALQLLNLSENGLSLDAVFSLTQCFSTVRWLQRLDFSSESQHVILSGDSRGRHLLAGGSLPEFQAGAQFLGFRQRRIPRSFCLKECQLEPPSLSRLCETLEKCPGPLEVELFCKVLSDQSLETLLHHLPRLPQLSLLQLSQTGLSQRSPLLLADLFSLYPRVQKVDLRSLHHMTLHFRFSEEQEGGCCGRFTGCGLSQEHMEPLCWSLSKCEDLSQLDLSANLLGDDGLRSLLECLPQVPISGSLDLSHNGISQESALRLVETLPSCPRVREASVNPGSKQTFWIHFSRKEEARKTLRLSECSFRPEHVPRLATGLSQALQLTELTLNQGCLGLEQLTILLGLLKWPAGLLTLRVEEPWVGRAGVLTLLEVRAHASGNVTEISISETQEQLCMQLEFPHQENPEAVALRLAHCDLGTHHSLLVRELMETCARLRQLSLSQVKLCKASSLLLQSLLLSLSELKNFRLTSSCVSSDGLAHLTFGLSHCHHLEELDLSNNQFGKEDTKVLMGALEGKCWLKRLDLSHLPLSSSTLAALIQGLSHMSLLQSLRLSRSGVDDIGCCHLSEALRAATSLVELGLSHNQIGDAGAQHLAAILPGLPELRKIDLSANGIGPAGGVRLAESLTLCEHLEELMLDYNALGDLTALGLARGLPQHLRVLHLRSSHLGPEGALSLGQALDGCPYVEEINLAENSLAGGIPHFCQGLPMLRQIDLMSCEIDNQTAKPLAASFVLCPALEEIMLSWNLLGDEAAAELAQVLPRMGRLKRVDLEKNRITAHGAWLLAEGLAQGSGIQVIRLWNNPIPQDTAQHLQSREPRLDFAFFDHQPQVPWDA

SEQ ID NO: 8 - DNA, 8621 bp, Sus scrofa
gtctgagaagagcttcactcaggagcatctgacccaccaggagcctgcaacatggtccaatagcgccccttattagccatgagctgctggtgggttccctcctcaacaatggtgcctccttccagaaagaggatgtgattggcctgctccacggaactaagacgctgggtgatgagaagcacagaccgggagtaccgctcagggctttcatacaggagcgactccacctgagaaaaaaacacagactctgtcagagctgggggccactcccggaagagctgggacagacctcgccaggatcactgccacttctgccaggaaccccaaaatcaaagcttctcattctgagtgcttctctgtcaaacttttgatctgttaaggacggtttacatgagggggcaagagcgtgtcctatggtgaaactcataagtatgaagggtattgagtagcctctcctctctaatttttatattctctttcaaggagacataagtgagtagtaaagagaatgaatattcgagtcaggcagactcgaatttgggtccaggctctgctattcaacattgagctgaatgctatcgagtgcgttgttcagcctctcttagcctgcattttagcatctgttcgatgaagataacaacagccagctcacaagcattcacgatgaataattaaatgagagagtacatggaaagggcctgttaacatttctggcacatggtaagatttcaactaatattggtatgatgggatcttttcttttgtttggcttcacagattcagagtctgaggatcgtctcttttaactgactctaggcatgttggggagaagcgaaggggaactgagaattgcaaagactggtttggatgattatgatgttagtacaataacaaaggatgagtgaaggaaggaggactgggtgggttacaggcattaagaagatgactctctcacccgtgcttgactgtttgcatccagggcactggtagcatcatccaggatgagtacccgtggtttccggatcaaggctcgagccaaggccactgcctgccgctgaccccctgatagctggctcccagcctcacctacctctgcagagacaagtgcccaggtaagagctggataaacacatgtgcatccatgtgcttgcatgcacgcgcgagcgtgtgtgcacatgtgcacgcacgcacgcgcgtgcacacacacacacacacacacacacacacactcggactaacagatacagctggatagggaaggttctgggaaggtgaaggagttctgaggatatgaggatgaaagagccatagaaacaagctcttacaacttcatactgatgaataaaggcaagactattggatttcaacaaaggtaaagatgtctgagccataaaataaaatttaaaaaaaaaaagagttcctgctgtggcacagtgggttaaggatgcaactgcaggagttcctgacatgactcagtggtttatgaacccaactagtatccacgtggactcgggttagatccctggccttgctcagtgggttaaggatccagcattgccatgagctgtggtgtaggtcagcagctgtagctccgattcgacccctagcctgggaatgtccatatgctgtggtgcagctccaaaaaaaagcaaaaaaaaacaaaacaaaacaaaacccgaatgctgtggctcaggtcgccttggaggtgcagttcaatccctggcctggtgcagtgggttaaaggatctggcgttgctgcagctgctgcataggttgcatccgaggcttggattcagactatgggtgtggccataaaaaactagcccccccaaaaaagatgcctgggtggtgatatgagaggagagagcacctgtgtcgtagccttgcgggagcttggagatgaagctatgggctccggactccacggcggcagctatgacttcctccattgctggcttctggctcaggccataggcaatgttttcttgaaaacttcttccaaagagctgtggctcttgccccaccgcagccacctgggacaaagcatgatgagagaacgaggaacacaggagtatgatgatctggagactgaagactgaaaatctttattgtgaacaaatcatgaaatcacacagcctctctcctgaacacaccccccgcccccccaggatctcctgtcattcccagcactcctttcagagtgcccagtgagcatggtcttcttactcgcagctccctgccctcccctgtgccaccttcttgctcacctgtctgtgcaggtagcggtgctcatattcaggaaggggcttctcacccagcagcacctgcccctccgtgggctggtacaggttctgcagcagggcagccacggtgctcttcccagacccattgggccccacgagggcggtcacctcaccaggacgtagagtgaacgtgaggccctggaggccagagaatcacacactaagaggcagatcaaggcccctaaccttaagagcgtcatggacttggcccattgttttgtcagtgtctcaccccagagaagaaaagaggaaagtggagaaacacagcaactcctaccctcccacatgcacagacttctgctcctcagcgatgccacctccccgtggactagagatggaagaagagacaaagaccagggcaaagaccatgccgcacactcaatctcagagaccaggagaaaaaaagaaaaaaaaaatcacatttgaaatcacaaatggaaagaaaaaggaggagttcctgttgtggctcaggaggttaagaccctgacatagtgtccgtgaggatacaggttcaatccttggcttcgcccagtgggttaaggatctggtgtggctgcagctgccccgttcagtcacagaagtggctcagagccggtgttgctgtggctgtgatgcaggcgttcagctcctggcccagtgtgaccattaaaaaaaggaagaaaaaaggcaagaaaaaggaaagatggaagaccagatggatacacagattttgcagcagttccttaggatatgacagccttctccctgaaagcctcctttcctgtcctccctggaaatccaaactaggtcttgagtttggggcaattttatggaacagatgatgctcatctttgcctctgaagggtaaagaaggatctagctacacctgatgttaagcagactgaaggcaggaagacgattcagatcgagctgagaggaagattggtggagtgcaggggttggtgggttgtacctgcagcactgggacctctggtcggttcgggtaggcaaaggagacattctggaacttgacaagcccctctgactttaaggaagtcaacgatccactggccgggcagcgagggattcggtccagatactcaaatatttcctttgaggagcccacagccttctgtaccctggggtaggtggacagcagtacctggaggggaggtatgaatagtgagatgggaggaggtagtgggggagggacctaatctgcctgccaggattatgtgatgtgagaagggcaaagcatggaaggaaggtgactcagatggtgatgggacaggggagggaaaagccctgggatgtgagaatggaaggacctcacctgaacagcttcggtgaactggatctggtagagaacaaatgtgacgaggtttccgctgcttatagccccacctgccaccagcttcccgccaacatacaggattcccaccttcagcaacatccctgagatctgtggagagaccacacagaaaagggacttttgtagaaaaatctagaggggctgcagagaagcagaatcattagcattaaggagataagaagttcttggagttcccgtcgtggctcagtggttaacgaatccaactaggaaccaggaggttgcgggttcgatctctggcctcgctcagtgggttaaggatcgggtgttgccatgagctgtggtgtaggtcaaagatgtggctcggatctagtgttgctgtggctgtagctctagggtaggctggcagccgtagctccgactggaccccttgccagggaaactccaaatgcctcaggtacagccctaaaaagcaaaaacaaacaaataaacaaaaaaaaggaatgaaccatagcaatgccacggagtctcactcagttatacagaaaagaagccaatcgttattaccatcaccattatcaccttgtctgggaagcatttactctgcacaaaaggctttcatgaatgtaatgtcatctaatagtcgcatcaaaagccccataaacaaggttaggtcactgccatttttaaaactgagaaaacagtctcagagaagtgaagtcaccagcccctggtcacagagccggaaaatggcagcatcgtgataggaacttgatggctggtcgtgttcgctttcggttacatcacaggtgcccctcatccttgcttctgctactcccaggactctcactagcatccatgtagtgtcagcatgaaacgggacagggtgccagaatttatagtcctctgagcacccccttgaggcaaaagaaggccttggaaaacacttccctaaagagagggttgggtggatttttgtgtaccgtagtgaaaggaagccatctagcacgcctaaaaaggggggagggggttaggaacagtgagtagggtgactgagcctccggttgttagaatatggccactgaaccaaccactgggcagtggaggaagagtgtggagcagggtcatgggaaagggaatggcattgaggcatcttggggacaagggactaggcagtcatctgcaggtgctcacactggtggtccagaggtcgaccgcataggccagggcctccttctggttgagtgtcttcatgtcctgcagcttttgcttgaacttctgggcctcaccctcttcattggcaaagctccggacagtaggcatagctgacagaacctcaatggccacctggcttgactttgccagagattcctgcacctgtgctgccagcacctgtggagacgtggaccagagatgccacacatgattgttgacaaaccataggggacactagtacctgagttatccgattagagtttaaaggtgagacgtggcagagggaaggcaaggggacaaagggacacagccaggcccccagatactaaaggatacagagaagaggaaaatgacttagaagcgtcgtaggggagcatattcttgagatgggtgatcatgttcttaaagacagattgtgggcaggcattagaagagaagacacaagggatgtgaagatcaacactgagcaatctgggaacatggacgacagggacaaggagtcccacaaagaggagaaccagtgaaggtgccaggaaagggatctgagcccaccaagtctgggatgagggtcagtgtaggttgaggcaactccctagacatacctggtgccatttccccagcttctcaggcagaaggaaaagcagtggcaaggcggccagggtgaccatggtgaggggaggtgacccccagagcatgagccctaagagacacagtccccgtgcgaggtaccacagcaagaggctcagctccgaactcagagacacactcacagtggatgtgtcctctgttacccgagatgtgatggcacctgccaagggttcaagagaagagagtggagtgaacaggaggctcagagtgatgggagcgacgagcaatgagccaggtgccacagcgaagggcatcaacacagtgttctaagaaggtcaggaaaaggagttcccgtcgcggcgcagtggttaacgaatccgactaggaaccatgaggttgcgggttcgatccctgcccttgctcagtgggttaacgatccggcgttgctgtgagctgtgatgtaggttgcagacttggctcggatccgcgttgctgtggctctggcgtaggccggtggctacagctccaattcgacccctagcctgggaacctccatatgccgcgggagcggcccaagaaatagcggggaaaaaaaaaaaaaaaaagacaaagaaggtcaggaaaacaaggtctgtggttgggggaggactgaaacataatgcaagaaaaatgtgttagagtggaaaagcctggccaaagaccttcgttttaactataaagaaattgatgcccagagttcccactgtggctcagcggttaaggacctgacgccgtctctgtgaggttgcaggctggaaccctggcttcgctcagtgggttaaggaccagctgttgccacaagctgtggcgtaggtcacagatgctggatcaggtgttgccatgactggcacaggcctcacctgtagctctgattcaacccctggcccaggaacttccatatgccacaggtgcagtcataaaagaaaaaaaaatttttaaagaaatggatgcccatgtgaacttctgtttctctgacaggtgtctgttccttaaagaacttgtatataccatgctcataggtaggaagaacttaagctggtcatacaagagctggagaaaaatggagagactactagagagcagtccaggaaaccacagcaagcactggattgggaatcaagacatgggttctgctctcaagtttgtcttcatccatgtgcatccatgcaaatgttggcatttaggtctagacctcatttcacttctctgtaaaatgagtcagctagactctctaatctcaaaatttccaggtttgaaattctacctaaatacacttatagggatagtttatggaaaaatcttgggtggaaacagtaggttaatcatttttttttttgttttattgtgtttttggttttgtcttttttttttttttttttttttttttttttgcccttcccacagcatgcagaatttccctggccagatggaacctcgccatagaagcaaactgagtcacagcagcgatctgagccacagcagccacagaactacagcagtggcaacaccagatccttaacccgctgagccaccggcgaactccaacagtaggcttttctaaaggtaaagagcatatcttgctcttgaagtacatcaagaataaaaagggacaccatttgtgtgtgtgtgagagaaagatcaagattataagtaaaagatgaagtgtggggatacaaatagaaaacagacggataatgaaagaggttcataagacacctgtttgattcttctgaaaaaactctgtttcttggcgcaggacagaccgaaacacctctccctgcaggtggctgtgcacgcggcccatggtgctgttatagatcccgtcgcacacgaactccagcaccgagctagagggagacaaagaaggagggccggtcggtcagggaccccgtagaagtgcactttggagggcggccccaacttccaactgcgcccttttcagggtcccccgtccccagccttccaagctcagcagtcagacctggctatgatgaggatggacatgagagttaggttctgcgtgaaggcagcacctgccccatctcgtagaatccagtcagtgagccggcctgtgaagaacggaatggccatctcccctggggagggagaggagagatgggcgggtcagaaagagcaagtctaagcagcctaagcagctcagctctaaccaggctgcacctcccgcccatcctcccttcacccttgcccattatcctgcagaaacagcgcacactctcggcactggaatgggcccccggggaactcgtaatcctgtggcctcaccagacctttagagggttaattaagaagcctaggatggtaggaggaaagagctcgcccaaggtggccagtgaagcaacacctgagcagcactggagtccaggactcctgactcccacccagtccagggctctttcctctccaccaagtggacctgagcggggtgggcttgctcttatccacatttccgagaactcacacctgtctatctcactgaccgttaggcttgattcctacccagccctctagcctccctctccctccccccgcatcccccttaccaaggctggagaggaccaccagggtcagaaggagccagaggtggcggatctctgagcccaggcagccgagaagccggctcactgtcactccagagcctctgtgacttccttgcacccaaaggctgctaagcttatgccacagggcggccgcgggcaatgccgccgcatagctgagggcgaaggcatcgaggcgactcccccagtgcagtagccgcgtgctgtcagccgctcccgagcccaactctcggaacaaggcaagtcccggcagagccaagcccagagccgccgccagcggctccaaagctgccagccatccccgaagtcctgtgcttttctcccggaagccaaccgtcgccctgaggacgctgcgggcccccaaccacagcacagcccaacggctcaggcccaccacccagacccggagcagcggcagcgctgggggcagcagcagggaggatatccggggcagcgccggccggagcagcacccagtcggcgagaagcagcagcgctgcccccagccaagggagggaagctcgggagacgcagagacacccgcagggagcggaggaccccgagctggccattggccgtacgaggtcgaccc

SEQ ID NO: 9 - DNA, 2280 bp, Sus scrofa
gcccttgggtcgacctcgtacgccaatggccagctcggggtcctccgctccctgcgggtgtctctgcgtctcccgagcttccctcccttggctgggggcagcgctgctgcttctcgccgactgggtgctgctccggccggcgctgccccggatatcctccctgctgctgcccccagcgctgccgctgctccgggtctgggtggtgggcctgagccgttgggctgtgctgtggttgggggcccgcagcgtcctcagggcgacggttggcttccgggagaaaagcacaggacttcggggatggctggcagctttggagccgctggcggcggctctgggcttggctctgccgggacttgccttgttccgagagttgggctcgggagcggctgacagcacgcggctactgcactgggggagtcgcctcgatgccttcgccctcagctatgcagcggcattgcccgcggccgccctgtggcataagcttagcagcctttgggtgcaaggaagtcacagaggctctggagtgacagtgagccggcttctcggctgcctgggctcagagatccgccacctctggctccttctgaccctggtggtcctctccagccttggggagatggccattccgttcttcacaggccggctcactgactggattctacgagatggggcaggtgctgccttcacgcagaacctaactctcatgtccatcctcatcatagccagctcggtgctggagttcgtgtgcgacggaatctataacagcaccatgggccgcgtgcacagccacctgcagggagaggtgtttcggtctgtcctgcgccaagaaacagagttttttcagaagaatcaaacaggtaccatcacatctcgggtaacagaggacacatccactgtgagtgtgtctctgagttcggagctgagcctcttgctgtggtacctcgcacggggactgtgtctcttagggctcatgctctgggggtcacctcccctcaccatggtcaccctggccgccttgccactgcttttccttctgcctgagaagctggggaaatggcaccaggtgctggcagcacaggtgcaggaatctctggcaaagtcaagccaggtggccattgaggttctgtcagctatgcctactgtccggagctttgccaatgaagagggtgaggcccagaaattcaagcaaaagctgcaggacatgaagacactcaaccagaaggaggccctggcctatgcggtcgacctctggaccaccagtatctcagggatgttgctgaaggtgggaatcctgtatgttggcgggaagctggtggcaggtggggctataagcagcggaaacctcgtcacatttgttctctaccagatccagttcaccgaagctgttcaggtactgctgtccacctaccccagggtacagaaggctgtgggctcctcaaaggaaatatttgagtatctggaccgaatccctcgctgcccggccagtggatcgttgacttccttaaagtcagaggggcttgtcaagttccagaatgtctcctttgcctacccgaaccgaccagaggtcccagtgctgcagggcctcacgttcactctacgtcctggtgaggtgaccgccctcgtggggcccaatgggtctgggaagagcaccgtggctgccctgctgcagaacctgtaccagcccacggaggggcaggtgctgctgggtgagaagccccttcctgaatatgagcaccgctacctgcacagacaggtggctgcggtggggcaagagccacagctctttggaagaagttttcaagaaaacattgcctatggcctgagccagaagccagcaatggaggaagtcatagctgccgccatggagtccggagcccatagcttcatctccaagctcccgcaaggctacgacacagaggtaggtgaggctgggagccagctatcagggggtcagcgacaggcagtggccttggctcgagccttgatccggaaaccacgggtactcatcctggatgatgctaccagtgccctggatgcaaacagtcaagcacgggtggagtcgctcctgtatgaaagccctgagcggtactcccggtctgtgcttctcatcacccagcgtcttagttccgtggagcaggccaatcacatcctctttctggaaggaggcaccattgttgaggagggaacccaccagcagctcatggctaataaggggcgctattggaccatgttgcaggctcctggtgggtcagatgctcctgagtgaagctcttctcagac

SEQ ID NO: 10 - protein, 746 aa, Sus scrofa
MASSGSSAPCGCLCVSRASLPWLGAALLLLADWVLLRPALPRISSLLLPPALPLLRVWVVGLSRWAVLWLGARSVLRATVGFREKSTGLRGWLAALEPLAAALGLALPGLALFRELGSGAADSTRLLHWGSRLDAFALSYAAALPAAALWHKLSSLWVQGSHRGSGVTVSRLLGCLGSEIRHLWLLLTLVVLSSLGEMAIPFFTGRLTDWILRDGAGAAFTQNLTLMSILIIASSVLEFVCDGIYNSTMGRVHSHLQGEVFRSVLRQETEFFQKNQTGTITSRVTEDTSTVSVSLSSELSLLLWYLARGLCLLGLMLWGSPPLTMVTLAALPLLFLLPEKLGKWHQVLAAQVQESLAKSSQVAIEVLSAMPTVRSFANEEGEAQKFKQKLQDMKTLNQKEALAYAVDLWTTSISGMLLKVGILYVGGKLVAGGAISSGNLVTFVLYQIQFTEAVQVLLSTYPRVQKAVGSSKEIFEYLDRIPRCPASGSLTSLKSEGLVKFQNVSFAYPNRPEVPVLQGLTFTLRPGEVTALVGPNGSGKSTVAALLQNLYQPTEGQVLLGEKPLPEYEHRYLHRQVAAVGQEPQLFGRSFQENIAYGLSQKPAMEEVIAAAMESGAHSFISKLPQGYDTEVGEAGSQLSGGQRQAVALARALIRKPRVLILDDATSALDANSQARVESLLYESPERYSRSVLLITQRLSSVEQANHILFLEGGTIVEEGTHQQLMANKGRYWTMLQAPGGSDAPE

SEQ ID NO: 11 - DNA, 75569 bp, Sus scrofa
  modified_base (6835)..(6934): a, c, t, g, unknown or other
  modified_base (57902)..(58001): a, c, t, g, unknown or other
actgagaaaataatttatttaattttaaatcaggaatttttattttttaatattgaactattaataagatcttgaatttgtccatttgaaatttaaatttaaatgatttttttttaaaaaatcaagattccttcaaaaggaaatatcagtccttttctttaatctttgagaacgaatcatttctgtagtttggaacttgcaccatgaagtctctgcactccagaatggattccataaacttgcgttatagagaaacaagagtcctaattgacttgtgatttcctttttcttttacaagactacttctccaggatttttgttgagttattttgttgggttattttgttgagttattttgctgggttgcaaaaatttttagcaagaattgaagagtaggaggcccagggaaacagtagagaaaatgtaggtttcattttatcaaagaagcccatcgtgctgaacatcaagtcagtgcaatggctcttcaagtaaatcatttgaaaatggacacaaatgacctaaactggaacacaagcaaaagtatatcacatacctgcagatgtaaatattgcctcctaacttcctttacaccaaactgcttaactttaaattacatgtaagatctcatagcttttcttagagaaagggattgaaaagctgtttagtcatgaggactgggtctcccattgccatcctctctactttgatataaaatcaattaaccactttattaaacatgtccggcagttacacttcagtagtgcagctggggcaggggaaatgagaggttccctgataagcaggcttttcctctagtccactccttgacggtggctctcaagttgcccatgatgggctgagggactctgagagttagagcaggtggcagcaggacttgctgatgcctgattgtcatgaagccaagatctaggaagtcacttcaacccactgtaggcctctgtccactctgacatcatccacttcctctgagcaaggatttgtagacacaaattccagagtctggcagactgaatatgacttggccaaagcaagaagcatcttctaagacagtgctgctctagttgtcatatggttgaggaggctggagccactctcattgcctcccattcagtgcctggatccaagctgtatgtacatgccaactccatgccctgtgtctcttagaaatggcattgccccacagtgatcagccccctctctttccaatctgtcttcgctatttcatggcaaacttacttagaagctgtgcttttatttcgtgctgagctcccattggttcattcggattccctgtaactcccaacattcaccattgggaatcttgatcagtatctgcgcagaagccaaacaaaaccctgatgcgaaaaggacatggacttcaaataacctgaagtcctctgctgttgaaatcatctgaggattgctaaggtagactctgatctcctgctgcaaagcaactctgttgctttagacttagcagagacaggaagacgctaaaatcaagaggacgacccctcccaatcttattttgttgccaaacacttccctttgcatacttttctccagtatgacatgtagagtgtctctgactttttctttgcctatgacaatttttttttttggttcagttaatagtatataccccctcaacccagaacagataagaaatcattgggaatttacatctgattactacagagtcattctcccatttgacaaggctcaaagttgcaaggaagaataatatgtacttactgtgttggtattttgttagtatttttttaaaagttaaaattaagtgctacttctctgaggaagtagccagagtaatactctttcaaattcagaaaactgctggcacaatttaaagtcagatgttatttctaaccaaattatactcttttttctgccaagctatcttgacaatcctaatatccacagacatgcctatatgataatcccagcagtattctggggataagattttagtgggtttgttgagaaggaaatacttgtttagatggctttcatcatgccactcggcttctatgtcattttccttgtcctggaggattcccttgaagcactcctgagtgatgtttagaacctgagtgggtgttcccccaaaaatggctgcgtggtaataaaaatccccctggccaaacggaatgtaggctgcggactccttccgcctctcgtaggtgaactcgtcaggatgtgccttgtaccaccaggcctgtagctgagccaccgactggcccagggtctccaccccaaagttgttttggaagacctgatccacgtccatgcagaagaggaagtccacctcgtgctggatgtgggccaggatgtgctccccgatggtcttcatgcgcatcatgctgatgtcttgccacctcttctcggacttgatctcaaacactttaaaggaacgcagaggacccagctctatcaaaggcatcctggagatatcatccaccatgatgtaaaagatgactttgtggccaaccatgaagtatgtatttgcagatattaagaactcctccaagtaatgctcaatgtatctgaaataaagaagaatggggtaaatgtaacctctgggatttctagaggagacaatatgctattatcatctagtctgtattttgcagtttaggaaaggaatgatttttccccatcctggatgagagacgtctgttgctgtaacattcccagctactctccaccattcagtcattcagctttggggaggtggagtggcttacctgactggtgattctggcagggtggctgggcatgctcagccctgctccttcctctctcactcttggaagccaaccaggcagagagaacatgtgttttcagctgctctgggccttgcagtggtaccttagtggcacaggccctgctcccacatccagaggcctgcagttacttgtgctgtatgtgcctggatgcctaagtctttctaattctgtggttcaagatttggaagcccagggcctgcagttataagccacatactccaacaccagctttaactgtaatgaaggtgataactcattaccatctgccttaattagtctttatccccttgtccttatcaatcagttcagatgctagttcttccttttttcctgcattattcagatataactgacatatatcattgtgtaagtttaaggtgtgcaaagtgttgatgtgatgcacttatttttaatttttattttttgtctttttagggccacatccgcagcatatggaggttcccagactaggggtctaattgcagttgcagctgctggcccatgccacagccacagcaacaccagatctgagctttgtctatgacctacaccgcagctggtggcaatgcttgatcctttaacccactgagcaaggccagggatcgaacccaaatcctcatggttactagtcagattcttaacccactgagtgacaacggaaactccctggtacactcatatattagaaatgattaccactgtggcattacttgacaccttcatcatatcacataattaccatttttttgtggcaagaagacttaggacttattctctgaccaaccttaaagtatatattacagtatgattaaaaacaatcaccatgctgtacattagatcccagagcttattcatcttataactgcaagtttgtaccctttgattaccatcagggggcactagttcttagctcttcctcaaaaaccccagcctatattccaatacttttactgacctaccagatgcaagcgtgatgtgcaagggtcattaagcctaaccatcgccactctcttatccttctctgggacccaaacaatggattatggaatatggatattcttccatcttactgatttaccctgtgagtttcccgctggtcaccccaaacaccagcccattatccagacaccatcattataaaacccatccaaatatgagagcaaacgacctctgattcaaccttactttaactatctcgtttcatttaaaaaaatagattttagtttttagaacatgtttaggctcacagcaaaattgagctgaaagtgcagaattccccccgctccccccactcccactcccagcttctcccaccatcaacatccagcaccagggtagcacgtgttgcaactgatgaaactacactgacacatcattatcacaccaagcccgtagtttacactaaggttcactcttggtggcagactttctatgaatctgaacaaatgtaaaatgacatttatctatcactatgtatggtaccatacagagtattttcactgccctaaaaaatcctgtgttctgtctattcatccattctcccacaccatcgcctggcatctactgatatttttactgtctccatggatcagtacctttgaccttttccagaatgtcatatagttggaaccatatagtaggtagtctttgcagatggtttcttggtaacgaacatttgaggttcctccatgtcttttcatggattgatttttttttttaaagcactgctaatactccactgtctgaatgtgctacaatttatcaattaatttgcctactaaaggacctgttacttccaagttttgggcaattatgaataaaagtgctataaacggagttcctttcgtggctcagtggtcaacaaacccacctagttgcaggttcaatccctggcctcgctcagggggttaaggatccagtgtggccatgagctgtggtgtaggtcgcagatgtggctcagatctcgggttactgtggctgtggcataggccggcagctgtagctctgattcaacccttagcctgggaacctccatatgccgcaggtgtggcccaaaaaaaacaaaaaaagaaaaaaccaaaacccaccccccccaaaaaaaaatacctgctataaacatctgtatgcaagtttttgtgtagacataaagtttcagcttttgagggtaaatactaaggtgtgccatcgctggattgtatggtaagagtatgtttagttttgtaagaatctgccaaactgtcttacaaattggttgtatcatttcgcattgccagcagcagtgaataagctttcctatcgctctacattttcatcagcagctggtattgtcagtgtttgggatttgggtcattctaatagatgtgtagtggtattttagctatttacctattcattcaaaaaccatcatgttcaggaagaaaaggaaaggggggagttcccattgtggcagtggcacagtgggttaaagatccagtgttgctgcagctatggagaaggtcacagctgtggctcagaacttccatacgccacaggtgcagctgaaaaagaaaaagagaaaaaaaaaaacccatcacattcctgtcttctgtaagccaagatacaggctattctgtgaagccatggggatgatagagaagggaagaagtagttggctggcttaacacaacccacgtcaccacccagactcatgcccagtgactgtgcactgaatttaatttgttgatcacattatcagccaatgatgacattttgtaataatgactggcacttccttttgttttttggttgctgcttggattccctttgattactacaaacataaactgtgctttcaatgctggtctctggaaaccccaggtttatagtattgattctttaaacggagagaatatctcagcaatacaaggagggacttcaacatggctctggggctaatggccaggaaattcttctgcactctggaactttaagaaaaaatctattgtgccctgaagcttgggaggtgatcctaggggcgagggaggaaacctttgtgaggtttaacattgtttagagattaaagcgctgcagttggtgctgtgcactgtcatttgaaaataaaccaaacatcacacctcctaaaagtccaaatccactcttgggaggatttattgctgctgagtacaaacagtcctcactcgcctcagagcagagtgcgcgggtttcaccaggacatgccaagtacagtttagttctctaaagctgcaacaagatggctagagccaatgtggagccgttctttttggaaacaccaaggttaaatcaatctgcagtatggctggctggtctcctcttataccaaaggattaggtgagctgggaatctttcccaactcctaacagaacatattcttctagtcgaaaggtcaaaactccagagtcacccttctctattagagatgccacccaggcccctgggatcagtacattcagggacattaggacttgattagtacagtgacagtgataccttctgggctctaggttggagaaggtctcaggaggacgcttaaatcttcactcagatcaaccttgaccttcacttctctttgtacaggcaacaggtcaactaacttcttttcttttcttttcttttctttctttctttctttctttctttctttctttctttctttctttctttctttctttctttctttctttctttctttccttccttccttccttccttccttccttccttccttccttccttccttctttctttctttcttcctttctttctttctttcttcctttctttcttcctttcttcctttctccctttctctctttctctctttctctttctctttcccttccttccttttctttcttccttccttccttcctttcctgcttttttagggctgcaccctcccaggctaggggtccaatcgaagctgtgatgatggcctgcgtcagagccacagcaatgcgggattcgaaatgcatctgtgaccacaccannnnnnnnnnnnnnnnnnnnnnnnnnnnnnnnnnnnnnnnnnnnnnnnnnnnnnnnnnnnnnnnnnnnnnnnnnnnnnnnnnnnnnnnnnnnnnnnnnnntttcctttcttctctttcggatttttttttaagtttggtgaaagtatagtgtcttacaatgttgtgataatttttctgtatacaaagtgatttcagtttctttgtggcttcagaaaaggtacagatggaaaggcccatggatgtgggggagggaaggggcacggaggtgaacaggaaaattgaacttttgcttttgttttggaaaaaaagggggggggattctctaaaaaagaaaactgggttatattttaaacgaacattacagctactacttttaagtaagaatgtttacagtttggggagaaaagttccaaacaaggaaacgggggctgaaacaggaacctatccaacctctggaagaggaagttctgagcagcctaatctccccgggccaaaccctccaggaggaataggcagaaggcacagaggagtggtcagccatgcggacgtggaaaaccactccacttaggacacttctgtctttggtccttggtctggggtctcgagagcataggagaaacgacgcacacacaggccatctaacaattgccatttttggaatttccacagagggccgtggaggtcagggcggaggtggctgtgggtgtactgtcgactctgggtgcagtgggtatagcagatcttcttccctgcaacccaagcccctcaccctgaggtgggaaagagttgaccctctgactagttttattcttagcctttggggacctcagcagaagggagtctaaaatggccctgtgacaccattctcctctccactaattcagacatgacatgaacagcctctgtaaacccaggggcccctcacccatcctctgatagtggaaggggaaaaactcaaggccagttttattagcaacacctaccttccgacagcaaaaaccgtcaagcccacggtaattttctgtttggcataataattatctaagacggctctgttgtaagtgccttcccataccactggagccttccatctggttatggtcacgacctctgggcgtttcctggtgacaaaacatagagtcaggatggctttgctaaggtacgacagtctgggggaacatgggtcagtcatggcttgtggtgactggccttgaatcctgactgtattttagccccagtcagctggtggtgtgacattgcagcatcttctgggggagggacaggaggctctggcccaggtgcctctgcgggctgccctggtggcccctttggggatcgtacctgtacaacgtgtatgtaccttccgtccccctgttctgctgtcctcgtcctcaatcttccttccaaaccccttcgcctatctccccaggcccttcctaagctgccagcgacatctttgggtgttgcttatcccagtgggtgccacctgaccctgagaaagccctatggcttgactagcgggatgagagagtgacatttgagctgaaagaggaagaagctgtctcagtttgccttctgccagaaagcaatttctgggtaggaacctggttatcggacaaaaagggccccagactaaggggacctggtgttgtggttcattttacgaagaaggagacagtcacccagaaaagaagggacccggcgggctaactgtggccatgggtgacacacagggctcgggctcagacctctctcagatcatgtcacctcttgactagaagcacaaaagcgggaggggagggggcatgttctctgcacccagaacacttgaaagggacttagcaaagccaacacaaacacaggaagccacggaagagcaacggacaaattgtaaagagtaaatgcgggaagtctgggtagcagctggggccccccagaggcaggagggagctgagaagacttggctcaaaccccatttgctctggaagtggctgcacttccccgtcggaaacagactgaaacgtggtcatttagattcaacccccaacacaacatgagagggcctggcccctgctagctgtgtgcttgtatttcagccactgcagggagaaggccagtggttggggcaacgtcttgggggtcccatcgggcccctgctggctgcctgggtatggccctggtgaggctgtctaggagatgttagcccagcgagaacatacccccaccctcatacgcgggtggaggaagggttttcacaaacctgcccctcccccatgggagaaaccatgtttccctgcgagattgggcaaggctgggtcacccccacttcttgctcatgccttctgtccctcgtcaccaagctctgcacccgtattctggagctgcctctgccctcccacccccaccccatgccctgcttcaagcctgcttccttcctcccctaagagtaattctgcagagatggaggggacatggctaggctgctcaaaccccacacccccagctctgccttcacaccccaggtatgaccgccccttggggacacctgctcttggtttccaacaatcatgaaagaagctgttttggactctgtaccaacttgtgccaggtactttcacatacactttctctcatttagtccttgcaaaagcttggccatgtagtatgctcaatgtacagatatgaaaatcaaggctcaggaaggcttgttaacttgaccaaggccaaacagcagatgatggtaactaacacacactggctccttcctatgggaccaggcacagtgccaagagcttcacccttttgtgggggtggggttgctatattttgattcccattttatctgtgaggaaactgtagcacagagtggtgaaataacttgtctgaggtcacacagctagtaaggagccaagctgggatttgaacccagatagtctgactgtggtctgtgctctgaaccactaccctctatggcttcttggctatttacttgctgtaccaatgaactggagttaaaacccaggtatgtcatcatttccactcatttgagctacttcagcatttttatcagggcagaataaaaaaaaatgatgagctttttttttgtttgttttgttttgtttttagaaacttatgtgatgcttttctcacataaaagccccagctttgttgaatgactggatttcaaaccaaaaaaaccacacacacacacacacacacacacacacacacacacacacacacacagcttaggcttatcattctataaccgtttcccatgcactgtcacttcattcattcctgtccttagtgtagcctgtcaaggatctcttagcagttcagaccccagcctatcagttaagccatgcagctgtgtgtgagctgaacatctggcaagcaggcaatattatctttaagcaaagaaaaggaagagaaagagaaggaggaagaggaggaaaggaaggtattcttatttactagtcgcaagcactggggttaagtaccggacttttattctctcattgaatccttacaaccacgttcaagagtgggtgctatcatcacctccatttcacaaataaagaaagtcgggggtgagagagaaggaaactatgtttttagccattcaaccaataggaggggccacaccagggcatcacctcctcgatgcacatctgccaagtccctgctccatctgccggggcccagggctaaagacggagatcagacccatcctaccccttgagaacttcccatccctgacaggtggtcagcctgccgcacactcctcagccgcacaacccctcagactacaccttctagaaagaccgattcagaacaccagtgtccagtttggttacttggctgggaagattccttttaagcaggggggagaaaaagtagcaatattaaaaattaacgtcgaattaaaaattaaaatgctctatttcccagctgttaattattaaattccactggcaattccaacatgtcagcaaccctgactaggaagccatatgacaggctgaaaacactggccgtgggcaggaggaggaggtgggaggatgattgagatcagcttcctggatgaacctctgctcaaaccccacccccaccccggcccacagaaaaagaagaagtaacagcaggcaggccaagtatgtgtaagagcaagagctgcccaacgtcatcaagagagggctcgaaaaggagggaaaagtccaggaaacactggaaactgctcagttttttaagccgggcacccactgcgttacttcggcatgtggggttccaccagtgcaaaccaaagacttccacaaaataaaagggtctccaaaatccaaacgcaccacctacctaggtagttggtagcttttcaattttatgtacttatttatgggtacactgtggtcctgaagggctgggcagaggaagtgttaaaattctatgaatcatacagcaggtggaaaaaaatgaggaatgcaacaatgtgttacttactggattccttccaggcagcaggacgtacacagtgatccagcaaagagctaatgatgccatggacaagggtgatggagagagggagatgacgtgggaagaatgaacagaacatgtagatgaattagactgtgggctggatgaaggaaggatgaacagtgaatcatggaggtctcctgactcttgcttgagatgggaaatgagaagaatgagggtggggtggaatcaaaaactccctctgggagttcccgtcatggctcagtgggaacaaatctgactagcatccatgaggatgcaggttcgacccctggccttgctcagtgggttaaggatctggcgttaccgtgagctgtggtgtaggtcacagacacggcttggatctggtgttgctgtggctacagtgcaggccggcagctagagctccaattcaacccctagcctgggaaactccctatgcctcaggtacggcctaaaaagacaaaaaacaaaaaaacaaacaaaaaaacccaaactccatctgagtcatgcgagacctgcagtgatgtcaggcaagagttagacacaactgggtgctcagagaaaacctttgggctaaagatataaatgcagtagtcattgtcccatgaatggtatctaatgccacagaaatggatgaagacagtgtataaagaaaagagatgaggataatggactcaacctccagaaactctaacacttcctggctgagaagagggaggggccccaatcaaggagactgacaagggagctggagaagtcggaggaaaactaagaggatgtggtgctacagaggctgagagatcttgatgtaaaaatgtatacagaatacacttaatatgtttcaggtagaatacagaggacacatttctataaatatatctataatatatttctataaatatattaattcagtggctcatctttcctgcatttatgcaagcaatttactttggtgccctgagaaggcttagattagtgctactacatatcaatattctttaaatatctgctcagcattcatttggaggagaaactgagccatgcatgggggaaagtggaaagagtgacagtgggtggctgtggtctttcacctctgaccccagtgattcagccctggctccacctctcaagtcccactcagtaaagcacaagtaccacggtcagtgtgccactctctcttgaagggagcttggtgactgtctctagctgatctatctggcccctggggagtctcacacctccccacatgcacacacatctaaggggcttatcaaagctctggtgggagttcccgtcatggcacagcagacatgaatccaactagtatccatgaggtcgccagttcgatccctggcctcactcagtgggttggggatcctgcgttgctgtggctgtggtgtaggccagctgctgcagctccgattagacccctagcctgggaacttccatatgctgcaggtgtgccccctcaaaagaaaaaaaagttatagtgcttccacattcttccacttccaggagtagcttagcattccatagatggctaccctgtgcccagctcctcaaataacacatggggaggccaaaattcccattctttcacactgacatggacctcccatcctaaaacagtaagaaacttgccagaacatactcagtccttccagagtccaagacccctcatgctggaatagatgctattctcctcggatcctcctcctacctctactgctgctcccactccgtttcagacttcttttcctccctcccctgaccctttaagtgctgatgtcagataagactcagctctgctcctctgcctggactctgatggctcctcttccaatgtctctaccacatatcttctgccagcttaaaggccctgctgtacactgacgattatgtctcccccaaattcgtgtgttgaaacccaccctcaatgtaatggtattaaggggtggggcattggggtgattagatcctgagggtggaaccctcaggaatgggatgggtgcccttagaaaagaagccctggagagctccctctccccttccatggcctaagaacacaatgagaagacgggcatgtacaaactagaaagtgggttctcaccagacaccacatctgctggtgccttgatcttggacttcccagcctccagaacggtacaaaatacatttttgttgtttataagccaccccgtctatggtattctgttacagtagtctgaaggtctaagataggctctccatgaactctatccaaatgccccacaggtacctgaatccacctacatccttaatcaagctcatcacctcccctattcctagacctgtatctcctcctccagtccctttcctggtcaacggcaccagcatgcaccagtctctcaggcctcccagtcatcccggacagcccccaccttctcactcccttccacatcctttcaagtcaggttaatcacaccgccttaccaatcttggcaaatgctagtttcacatctagtgcccctataggactgtaaacttcttgaatataagtgtattgattaatttctcctgtctgtctcctgtgcctaacacaatgtctagtaccgtgactcatagtgaaatatatcctacgtcacaaacacatgcacatacacatatggaagcaaaaatgccactaaacaatacttatccttacttcatgagatgccttctgatttcctatttggtttcaatttttgacccttaagccagtttctaaacacattaatggatcaaataatagtctgacacacatgggctagcatatcataggtgttttaatgaacattgttgtatgcttgcttagagtgtgtgcatggccttgtaaggttttttaatcatcactgccattttattttatttttatttttttagggccacaggtgcagcctatggaagttcccagtctaggggttgaatcggagctgtaattgccagtctgcaccacagccacagcaacaccagatctgagcctcgtctttgacctacaccacagcttgcagcaatgccagatccttaacccactgagtggggccggggatagaatggatactagttgggtttgtttccactgaaccacaatgggaactcgcgtcattgccattttacagaggagttaaccgaacctaagaattttctttatctgattctagattctgtggctttccacagcaccccatgggctataggacctctcctagccccagtatttttttgctttttaggggctgcacccgcagcatatggaggttcccaggctaggggtcaaactggagctacagctgccggcctaccacagcaacgccagatccgagccacgtctgcaacctacaccaccggtcatggcaacgcgggatccttagcccactgagtgaggccagggatccaacgtgaaacctcacagttcctagttggactcatttccgctgtgccaccacgggaactgctagccccagtattttgtgattcatctgttgccattggctaattgctgtcagaatcactatgttgttgcgcaaacatttgagtcaaaacatccagactccccacctcccgggatgccacgccagtcactcacacacacacacacacacacacaaaatccggaccctgttttaagggtctaatagatgctaaaactctgtctcccctgtcgggaatgttctcatggccctgttgcctacacagcccctgccacctcctgctgagctgtggatttactgaaatagggcaacgcttcttttcttactcaggattaaaccagtccactagcggaagctctcctctgttgtcttcttttctttgttccttttcgttgcctatagcgtcttcttcttcgtggtaactgtgagtcctacgtacaaacggaaaacaagctgaggaaggcagggagggtgacccatgtgccagaatgagagtgaggatcttgtgaaaacagattccaaggcagagaacacgtgcgccaagcaaatgtctacagaaggcttgtgatactaaacatttattcgtaaagacgtccgtctgatgaaaaggttcagtgctcccctttttcatcatccttccagaccagcacagttagcaatgtaatgacccagcaattctcaggttctgtcaggagcagggaaacctgataaaacagtccttatcagcgtatgtaagctcatgacagcctttcctgcagcctcaacttcagcctgagcctcactcactcccacatcaaatgggaaaaaacaaaaccttgaaaaccaaacttaatgcccatccccaccacgcaacagagtccttgcatgattccaataagccagaaggacgaggcgactgagaaggtcatggctgtgaaaccattttatttggactctacagccttgagcagatacacagatggccgtttcccagtcttacccattgttaaaccagctcggaaaccaccagcccctctgagcactgctgccaacttctgggtttctaagaaatgaaaaagatgacaaacattttttagaaaatgaggcagtcccaaactggggcagggggtggggggtgttccaaactctttttatggcagatcacttaaaatcattttttaaaaaatcactaattcgtaaaatgaacagaaatgaagctgctccagctgaatgactgaggatggacccgacactccccagatctcccctcccttgggtggcccccggcactccgctggtccagggagccctcgcaggaagagaaggggagaagaagaatgacaagggggagggcactaatccataaatccaagtcctggatctgcccctttcctgttgtgtaaccctgataggacatttttcctctctgaatcgccattgcctcctctggaaagttagagaacaatgacagcaccaaacctaccatgaagatggatggcttcgaagactaaacaaagtagcctacgtaaaagagctttataagctgaaaattactgtagtaagttgtagtcttaaaaaagaaaagcccacatttccaagaatgatctcttgctaaatgaggagaactggagttgctacaaaggtcagcagtgacagattcaggaaacctgagggtttctaaacccgaagctcagcaaactgtaatcagaagccgtttttctccacacacatgctcagatgtccacactcactgtgagagtctctccaaggcgtggaccgtctagaggagggacaagagggggaaagccaggagctgccatgccctttggttggacaaatgaggtggtgaggcaggaataggcatagtagtaagaaacttactttattttactttattattttattttttttgtttttttagggccgcacccgtggcatatggaggttcccaggctaggggtctaattggagctgtagctgccggcctacgccacagccacagcaacttggaatctgagccgcctctgtgacctacaccacaggtcacagcagcaccagatccttaacccactgagcaaggccagggatcgaagatgcatcctcatggatactagtcagatttgtttgcactgcgccacaactggaagtccaagaaacttaaagtccatctactttcaggaagtgcttgaaatggcttatgaagaaagtgtggttacgataaataggaaaacaatacaagaatcaaaacaaaacaaaacgaaacagagaaacattttagtcactcgggtgttttcacatgactttggtcatcccagccactctgtgagaacaaaatctttaactttatttttacttcatagctaagatattggcaaaatgagtttgagcaaattgccaagatcccatggcatctaacaaaagccaggatttaacaccaggggataaatcatatcagatgaaggctactataaatcagctatactttaataagaaaaaatgttttaaaaaaaatgaaggccaaggaaaatgcaagcatttaagcacaatactttgctctaagcttcctagcaaccaagtcgaagataggaaaaaaaaaaaagaaaaatgaaggcttagagtccttaatcaccagtaatagtaataataataaataataataatacacacactagtttatcaggacacccagcctttcttcctaatcctttgtcttggcaaaatttctggcaagggtctttataccacatgtagtaggtagcataatggataatatctactctgattcttttttatgagcaaggcaggaatgttctccaaacaacatcacttaaagagatagatacttgatgagaagcaaaggaaaaacacaactcatgctctagaaaggcaagtctaggggctggagaagtacagctcagacccctggaaccccatccctctcctccacctaggaccacaagtgtgtcaccacctgccatgttaagaatggactgtagggccaccagggtcacatggaaggtgacctagagatatctggaattcaaagcacttactttgactggtatatccagaacaaagaaccttctgggctaaaagcaaatggaaataaaaacatatcatgttacttggaatgcagagaaaagctattttgcaatcattatcattgaaaccctaggctgagctgagagcctgggttgtggctactcccaggtttccaccttcgagatcgaaaaaatgatatcacgggactctcgtcatttcagaattactcagatcaaacggtgggagggaggtctctggaaaatatcaaatcttagtttaaagaaaaaaaaaatagatggcagctcttattgtccaaggtggctttgctgagggagagaggctccagagatgggtcccaggaagaccacagcccacccatccctcacccaggatttatcttcctccagaaaaacaggtcttgcctcgctggctcaaagctgtctacagagtagcctcaaagggcacttctaggagttcctgctgtggcatagtgggttaagaatctgactgcaggagttcccatcatggctcagtggttaacgaatccaactaagaaccatgaggttgcgggttcaatccctggcctcgctcagcgggttaaggatccagcgttgccgtgagctgtggtgtaggtcacagacaaggcttggatcctgtgttgctgtggccgtggtttaggccggcgtctacagctctgattcgacacctagcctgggaacctccatatgccgcacctagaaaaggcaaaaagccaaaaaaaaaaaaaaaaaaaaaaaagaaaagaaagaaagaaaggcagaaaaagaatctgactgccgtggcttgggtcgctgtagatgcacaggtatgatccctggcccagcacagtgggttaaaagatgtggtgttgccgcaactgcagctcaggttgcacctgtggcttggattcaatccctgacccaggaatttccttctttctttctttctttcttccttccttcgtggaatttctatatgccatgggtgtggccattaaaaaaaaaaaaaaaaaaggtacttcttaagctaacaaaagcagtgagaccatcctacaagacgggatcagtaaatatatgacgactctagcagaccgcctccattcattcaacaaatacctgctgagcatgcgttacatgtcaagtgccagacatacagtgttgactgaaacagacaccatgtgtctgtggtgtagagaagctggcagggagggtggaccctattttgataaacacatcattataggacttcaaaactccaagaaagcataggagcacttaacaggaagacctcgaaggctccccaggggaggggatgatgttttagctgagttctgaaggatacataggaggcccagtgaagagggattagcaagagtgtgcctaacagagagaaaaacatgcaaaggccccaagaaaggaaggtcgcatatttatttatttattcatttatcttttggggttgcacctgcggcatgtggaagttcccaggctaggggttgaattggagctacagctgctagcctacaccacagccacagcaatgccagatctgagctgtgtctgtgacctacaccacaactcacggcaatgccggatccttaactcactgagtgagtccagggatggaacctgcatcctcatggatactagtcagattcgtttccactgcgccacatcggaaacgcctgccctcatctcttaaaacagaaacaaaaaaccactaaccactaatatttgtttgagattctgccaaagccccgatctcctccctctgccttctgccccagctgggagtccacatctcctggtaggaatgaaatacatgccttcctaccacctatggtttcccctctaagctcagtacccatggacccagctctaaagtcccttgtttctaaatctgtctattgatctgataatattcataatagctaatagttggctggggacctttctaagcaactgacatgtattagctcattaaattctaataacagtcaatgaaggaggttctattcctcctcagagggacagaggcaataaattattttgcccaaggtcatactgctaagggaagaaacagtatttgaacctggggaatctgacttcagatcctacaagagggggaagggaaaggggcaagaggagggggagggcccgtgccacccagcactcaggagccccaccctcctgccgaggcactcagggcatcaatttatagatttggatttgccacctcgtcccatctttttagtaacccctccctcttcctcatctcaccctcctttcccagaagccttcaacacctcaggtcacagcaacaaccaccctgaagtgtacggcatttaacacatattcatccttcaaggcacagctcggatgccatctcttctgagccttctttggtatgaacctagcacaatgcctggcatacagtaggtgctcaataaatatttctaaatgagggagttcccgtcgtggcgcagtgcttaacgaatctgactaggaaccatgaggttgcaggttcggtccctgcccttgctcagtgggttaacgatctggcgttgccgtgagctgtggtgaaggttgcagacgtggctcagatcctgcgttgctgtggctctggcataggctggtggctgcggctccaattagacccctagcctgggaacctccatatgcctcgggagcagcccaagaagtagcaaaaagacccccccccaaaaaaataaatgcaaaacatagatccatctccaagccaaacataatcttgccctccctgaactctcacgttcctttgctctctctctctgacatcctccttctagcctgtgttgttgggctttcatgggtacctctgcctgctccatctacagcataaccccttgagggtagggattctccttggcgcacactgtacccctcgcagcatttggcatgaacaaccagctccagaaggagccccagatgatgaatcagaagatctgagttctaattagaagttagacataagttcactgttaaggcatttcacctacttgtccatcgcctgaacaatggaaaccttgactaaaggaagggttacccaggttacccaagtcagacagccctggacctaaatcttcctaaaaatgtgaccttgaacgttcacatttaatattgtggaaactcagtattcctcatctagaaatgtggactaacactgaccttccagggctgttttaaaaacaggagggaatgaacagtggagttcctggcacaagcaaacactcaataactagtagccgctaacatcaaaatcaccatcaccatcattactttattatagctcttaaagtttcttccacctctaaaattctaagcttgtggctcagtggcttaagaacccaactagcatccatgagaatgtgggttcaattcctggcctcactcagtggattaaggatccagtgtttgccatgagctgtggtgtaggtcacagacggggcttggatctggcgtggctatggctgtggtgtaggcagctctgattccacccctagcccaggcatttccataggccacaggtctggccctaaaaagaaaaaataaataaataaaattctaagatttttttttttttttcatctagcctttaaccaaatgctgtcctggatgacattcttaaacagctgtatgtgtttgatggagttattttgtaaatctctttttttttttttttcaagggccttacctacagcacatggaagttcccaggctaggggtcaaatcagagctgaagctgccagcctacaccacagccacagcaacaccggatacctgacccactgagcgaggccagggatcgaacctgaatcctcatggatactagttggatttgttaccactaagccacaacaggaactcctgtaatcctctttagctacagtgctacccacctgtctaaggttagtgccctcagctcacctcagaccaattcacaaggtggcaaagaatctcctgccttttaaaccccttgcagatgttcaaatagattcctcacattgaagaatgatgtggctgcagtctgggtgccagactacggccctgaagagcagccagaatctgctccagttactgtgaagagagagtgtgcccagcactgcaaaacaaccctctttatgggaggccagcaccaatatgcacttctgggcctttggcttctgtgttttaattttgtgaagtacccaaaatatggaagtataactctggctgcaattcaaaacaatcaagagttcagagcttgaaggttgcctacacaagcatctcaactcaggtcaggaaccccatggggaacttgctcttctgttagattctttcagcccctagaattttttctttttctttttcttttttctttgtagggccaaacctgtggcatacggaaattcccaggctaggggtagaatccgagctacagctgccagcttacaccacagccatagcaactccagatcctagccatgtctgcaatctacaccacagctcatggcaacactggatccttaacccactgagcgaggcgcgggattgaacccgaaatctcctagttcctagttggattcatttcccctgcaccacaacgggaactcctagaactcttccttctatttgccaaaatctcctgtcctatgctgccctccggacagatggtgatagtggtggtggtgatggcagccagcgcttactaagtacgttgcccttagtgctttattcacaacttattttatccaacaaccctatgaagcaggtactactatcatccccatttttaaagatagggaaacttgcccaaagtcacagaggagggaagtggtggcacaggaccaaccccaggcagcctagctccagcctccactgagaatatctcctcagtcctcaagtacctaagggagccccagggtctctgcatccaacgctgtcatcttttcttcagaggaagtaccacagtttcctcaattcgaaaaggttggtttgtagacatttgttcactctctagctcgtcttgtttttcttaaaatgagttcttcagaatgagagggaataactgttccagaagtggttagatctatgaagcatccaaaggaatgacagcttcttattctagggaatccacctcctcctttttttttttttttttttttttttttggctgcacctgcagcatgcagaaattcctgggccagggatcaaagccaagccatagcagtcacctgagctgctgtagggacaagactgaattcttgaacccgctgagctaagagagaactccctagagaatcctccttctactgatggacctgaagatgcagttcctttctaagtggccaaaatggtcctgctggctcatcaagtcttagaatttaagagacattctaacgttaatccaggccatcatcctgaacttgaggggctactaaaacactacccatcaaaatatcaatggtgatgacatagctctccaggccaagttgttttttggttttttgtttgtttgttgtcttttttccttttagggccacacctgtggcatatggaggttcccagactaggggtccaagtggagctgtagctgccggcctacaccaaagccacagcaacaccagatccaagctgcgtctgcaatctacaccacagcttacttcaacacccgatccttaagccactgagcaaggccagggattgaacccacaacctcggggttcctagtcagattcattttccgctgcaccaccacgggaatgccttcaggccaagttgtaaggtggcctttttgaaagaaagtccaagcggtatcaatacctcttaagtcaaagccatcatgcattttggtagctgcttgcagacatttctttctgtcagaagcgtctccagctggaatctccaaggcatcgtagtttccaaaagcaaagaagcagcgtcaaatatttggggtgaatccactgatgaatttgaaaactcagaaatgtttaattcattttgctttccagagttaaaaaaaaaagacaaaacacccaaaagtttagccaggcacaaatgaatcaccagcgactcagtgtgttttgcagcaaaagtcaacaacttgagttgttcctttaaactctgcaaatattttaggattgcaaaaatcagggtgtatttctcatggaattcctgtctgaaagttctcaaggtaacttccatatctggtcatataaataatttaatattatatcttggtcttaacatgaccttattatttctggctctagcctacccagaactgcagaggtataaaaatcaggacaatggcaacatggcaggaaggaagataattaattagctggaaggtacttgaagatctaatgactttaaagacggtatttaagggctcagggatacaggaagggtagaatattttctttctttctttgctttttagggccgcaagtgtgggatatggaagttcccaggctaggggtcaaactggagctgaagccaccagcctacgccacagccacagcaatgccagatccgagctgcatctgcaacctacaccacaggtcacggcaatgccggatccttaagccaaagagcaaggccagggatcaaacccacctcctcttggatcctaattgggtttgctgcccctgagccacaacggcaactctctggaatgctttctttacggtgtcagtgaatcctacttttaatgcaagctggtgacttggctgataactaggagattagaggagactttcatcaacatcatttcatcatgtttcataattacctgttgatgtattcccaaaacacaaccattacagttgagacaagcagcattgacagaaccactcttcctttgacattcattattttctcctgggaaaagaaaaggagaagggaaaattagattaaatacacccagagtggaatatggttttttaagaagtgcttataccaatatcttttctaaaaggaaaagttgatgaatagtcaacgagcgctaaggagtgcgttctaccttaatttgcataggcctacactggcaaattagccaagtcaatgaactgacagggccgtctgggttgggaaggatactaaggccattttgaggctcaaaggggaagcatcctgactgatcccaaggtccaccgagatgtgggagagtgacgggtttagttaatggtccctaagggctccagccgcccccaactcagatgccccacctcgcatcacagactagaggaagcatccgtttcctaggtctactgtccctgatatactgactatgtaccttatcctcaaagaaaaatataccctggtcctttatttaatttcatttaaattttagggccacactcacagcatatagagattcccaggctaggggtcgaatcagagctgtagccactagcctatgccacagccacagccacactaagtccacgccttgtctgcgaactacaccacaactcacggacagcaacgccagatccttaacccactgattgaggccagggatcaaaccttcgtcctcatggatgctagtcagattcatttcagctgagccacaatgggaactctcaccctggtcctttataatctaggctctgccacttcccacccagcttttccccaatgcacccacacaagtggcaaacagtcggtacattcgtatttcttgatcgctgcatgaaattgtagttgaagagggaagggatgctgggtggaataacaggttgcggagtactttaatttgggtggagatagaaagatatttatttcaaatggaaaggacaagaaaagtgtggcagctagccacatatcagcaatactcataaacaaagaatgtaacaaaagataaagtagggcattacataataacaaagggatcaataccagaggaagacataacattggttaacatatatgcacacgatatcagagcacctacatctagaacgcaaatattaacagacataaaaggaaaacttgcacaattacataatactagtagaggactgattcgcaacattttgtgggtcttgtgatttttttctttttaggtctatttgtctttttagggccgctcccgcggcatatggaggttcccaggctaggggtcgaatcggagctgtagccaccggcctacaccagagccacagcaacgcgggatccaagcctcattggctacctacaccacagctcacggcaacaccggatccttaacccactgagcaagggcaggaattgaacctgcaacctcatggttcctagtcggattcgtttccactgtgccgtgacgggaacgccaacattttgtgttttagatgtcatagtttacatcttcacagctatccttcaactatataatttagtcttttaacatctgtactagtttatttaagtgtttgatgcaacaccttcactatatatttgacttttctagtcttattatttcctttctgtattttctcatatcttgttacagttttttctttttcatttaatgaagacacaaacatttcttgcaagtcagtgtagtagttggaaactcagtttttccttctgggaaactctttagtcacccttcaatttggggagatgactttagagcttcccaagggatgaagataggatgggaaaggatgacaagggccgtgagaagggatgagaatattttggaaacagcatctataccaggcagacaagagaaagagctgctcgtgtttgaaaaaaacaaaagcaaaaaacctggacaagaaaaaaatagtgactgacactgtcccccttgagtggctggtgctaggcagtcagaaggggggcagaggcagtcagaacctggaaaggtatggaaagtagggtggggaatcccaaaaagcatctaaagctggagaatcccctgatccaacttcacctagagagacccatctgggtgctgagtgtggagaatggagaaaaggacaagggcagaccgttctcatgaccataaagaggaggtggcctggctcaaagggtggcttgattcaaaatatactttgggagttcccgtcgtggcgcagtggttaacgaatccgactaggaaccatgaggttgcgggttcggtccctgcccttgctcagtgggttaaggatccagcgttgccgtgagctgtggtgtaggttgcagacgcggctcggatcccgcgttgctgtggctctggcgtaggccggtggctacagctccgattcaactcctagcctgggaacctccatatgccgcgggagcggcccaagtaatagcaacaacaacaacaacaacaacaacaaaaaaaaaaaagacaaaagacaaaaagacaaagaaaaataaaatatatactttgacaaataccatatgatatcacttataactggaatctaatatccagcacaaatgaccatctccacagaaaagaaaatcatggacttggagaatagacttgtggctgcccgacaggagagggagggagtgggagggatcgggagcttggggttatcagatacaacttagatttacaaggagatcctgctgagtagcattgagaactatgtctagatactcatattgcaacggaacaaagggtggggggaaaatatacatgtaagaataacttgatccccatgctgtacagcgggaaaaaattaaaaaaaaatatatatatatatactttggagagagaattgataggacgtggttggtaattttgttatcagagatgagacaaggaagacccaagatttctgcttaagcaggggggttgtagtattttctcagatgggctggaggaggaacaggcttggaggataataatcatgaattcccttttggacgtgtgaatgtcggggagtgtgcgaatacctaaaaggggacagggagacaagtggacattcaagtctaaagttcatcagagagatgtaggcagaccatgcaatcggagaagttgttcatggaccaaggaacgtatcggatctgacgtgaagggaacgaatttgattacccaggagagaatgcagagagagaaagaggaagaggaggatgctgggctgaagctttagaggtaggatagaggagggcccagaaggagaggaccagaaggtagcagagacagaagagtggacacctgggagccaatgtcactgcctttgtgaagccacttcccacccccaccctgaccacggctgaagcccttttctctcctccggcccccatccctctattcctttgctgtacacatcgccctgggagtcggctcaccggataagacctgcattttgctctgcctcctctacctgcttgtttgagcttcctgagggcaggagggatgacttcttcgtcacccctgaattcccagtgccccacagagagcagagaaggccgtcaataaataatgagtggtttgagcttcctgagggcaggagggatgacttcttgatcacccctgaattcccagtgccccacagagagcagagaaggccgtcaataaataatgtgtgggagttcccgttgtggctctgtggttaacgaatctgactaggaaacatgaggttgtgggttccatccctggccttgctcagtggcttaaggatccggcgttgccgtgagctgtggtgtaggttgcagacgcggctcagatcccgtgtggctctggctctggcgtaggcctgcagctacggctccaattagacccttagcctgggaacctccatatgccgcaggactggcccaagaaatggcaaaaagacaaaaaaaaaaaaaaaaaaaaaaaaatgacgtgtgaatgaaatgagaatggcactgagatgtgtcctttcaggggacgggttattctccaaatatttgcagagagggttctgaggtgactccaggcttagatctcaggtgctccatcacctctgttgtgaaatccagttaaagaagagaaagtatgggattatcagccatgtcactctattccttcttgcttggaaagtgagctctgtttggaaacctctgattcaatcgccacctttcggatacaatcatgataggtggtgttccagagacggtgagaagatggggagatggagcttctttcctgtgagcacctcaggtcctggcacaaacagcccggggcccagggcaaagttacgaaatgcacggggctacatgcagctcggcccagatgctggaaaaagccacttgactcctacaccaacagcattagcactgagtgcgaggaaaggcctgggtttgggagcagacagatcggggtggagactgtggccactgtggccatgcctctctgccgttgtcttcactcccagagaagtgtgggtggtgagagagcttgggaaggaggtggggtctggagacacccacagactgggtaaccctgaacatggagcagtttctcagaccctcatccaactccaagctctgaaaaccaaaagcctgtttataattcagttggcatccaggccctgacacgaggctatttataatctttatcacttagtgagactgtttaaacatttctttgcataaatattgatgtacattgttatgtgctgttgctgcactggaggcgttacataatataggataaatattctgcatttgaaaaattctaaattccaacatatctggccttaggcattcaggaaagggatggtggacctctaattgatcacattagatgggtctcctcatctttaaaatgggaattaaaatggtgatgactgcaagagatggtgtccataaaatatttagcatcatgcccagcatcatataaaagctcaaaaactgctagtttgtattactggtatccataaaacaggctgttgggaggatccagtgaagacagcacagcgcctggtacttagcaagagctcaaaacgtatcggagggaaaggaataagcattttggaataagaatgtgttaaacaataaagtacaaattgatgcaaattagggcctctaaaggtttatccatctgttctatgctgcagactgactaaaagctcctgggaaatgccacgcaactttgattttctttgatcaagcccaggccatccaaagccttgtcatccccacctgctgaggatcaaaccctgtgtaagaaatgcgaaagagagaaacacaaactcctggcagagaacggatcagggagaagctggtataaaatcagacacacctcctaatcctttctccaaaggcaagtgtttttctgtttgttttggtttcagggtttgtttgggtttttttgttttttggtttcttttggtctttttaaggccacactgggagttcccctcctagctcagaggttaacaaacctgacttgtatctgtgaccattcaggttcgatccctggacccgctcaatgggttaaggatccagtgttgccatggctgtggtgtaggtcgcagatgcggcttggatccagcattgctgttgctgtggcgtaggctggtaactacagctctgattcaacccctagcctgggaacctccatatgccaagcatgtggcacttaaaagattaaaaaaaaaaaaaattaaggccacacccaaggcatatggaagttcccaggttagaggtcaaactggagctatagcttctggcctatgccacagccacagcaacgccagattcaagctgagtctgtgacctccaccacaactcatcacaacatcagatccttaatccgctgagtagggccagggattgaacccttgtcctcacggatactagtagggctcattaccactgagccacaatgggaactcctttgtttcatttgtttttgatttttttttttttttttttttggtcttttctagggccgcatccacggcttatggaggttcccaggcaacgccgcatccttaactcactgaacgaggccagggatcaaacccgccacatcacggttcctagtcggattcgttaaccactgagccatgacaggaactcctgtttttttaatttcagaaattagcatcagagacaactcttgaagcccccccccccttttcttttcctctggaccgtaaacatggcttgaatctgcttacttttcgctgtggccaggcatcactcttagagacttacagttggaagccacccaaatgagccaatattgcctccttttgaaaagcactgggaaggggtatatgcaagctttctggaatctggaaccctagtgtctcaggaaagaagggttgccagaatggccaaagggtttttaaaacattttttttttttctctggattaaaatgaggcatttggcagcccatgtggtctaaagcccttcacggatgtgtttgtcacagaattttctaactctctaattctcaagattggtggttgactatcttacccaccaaataggaaaagtgggggttgcttctacatttctcatggaagagggagagcacaggattagagcctagagagcactagcaccctgtcttataagggagagtgtaaccacctcagcaccacctgggccccagccctcagaggatcaggtgaacccagcgggcccagttccacctgagccctcccaccatcccacaggccctcctgccaaggcgtttgccatttctctctgctcctgggccactcccacaactcagcccctgcagcggtttccaaaagaaaccacttgcacccccactcccgggcctcgtgcagactgtgctaaaacccagtgcatttcccaaggcagggccacgctggaaagcctgtcatttctccaccttcctcctcctcctcctcctcctcttcggcttctccatccctggggtatcagactcttccccaaggcccataaattaatccttcctgacccacccctaacttgtcccacacagaacggtacacacaccccctccacttcagagaagctcatggtttcaccgcaactggtccaagtcaaggttttccttccagacagagttccactctgaaaggaattctagtggccctgtttttctccacctcgtgtcagggggaaaggtgagcacctcagctgaatcacagagctctcagaagccctggaaaagccattatcttgagagagcagcgagcaagcagtgacagaggaaaccaaagcttccagcagactaaagaatcttcctctctgcctgtgactcttgccctgcccctggaacccatcctgccctgctagctccacaggaccctggcaagggtcaagaaagtcaggtagtgataagtgcagcaaatgaaacacagtgcgggggagggagccaaggtggggaagccgcaggaactgactgggtgttactcaccctggacaaaaacctcctatttttaggcctaacatttagatccagcattccaggcagaaattaggccggtgctgggactggaatctgcagccctacatgcacttgccctgggcaagtcctctggctctgagcctctacttacacagaccaaacggagcttcaaacaccctcctccagggctcttgaaaggacaaaaggagaccccgtctatgaagcatgttgtgcctgatgctcagtaaatgctccacaaatgcagccagaacaagggcgatgctttttacggggagagattcagaaatgtgtggctctgacggccgagctgtggctctgtctgagaggagtctgggccctccagggcagcaccacacagaagggtccagggcgagccccccacgctgttgtgactgttgttggggccagctcagggtccccaagcgcatctcgtttgcctctatcgcctggcgcgcatgttgggcagggaaggaaagtcaggctccagggtcaccccagcacccacacagagcgggtttgtgaaccacacgcagctttctctggcctcagtctccccgtcctttgaaacatgtcctgtgggcttaacttccctgaatgagccaagacctgtatgagaaggcagccacagagctggaaggctccttttatgaggacaggttcactggagctcaacttgctgcagtggccacagattcctagaagtggtgatcaaaagataggattgccagagtttccgtcatgacgcaacggaaatgaatctgactaggaaccatgaggttgcgggttcgatccctggcctcgctcagtgggttaaggatccggcattgccatgagctgtggtgtaggtcacagacgcggcttggatcctgtgttgctgtggctgtggtgtaggctggcagctgtagctccgatttgacccctagccaggaaacttctatatgcagcgggtacggccctaaaaagcaaaaaataaaaaaataaaaataaaaaaagagataggattgcccacaaaatgtgttgagccctcaggccacttcacccagaagcctccgggtcaggcccccaggcaggcctggggtgtggagtgggcaaggcccaaatgcttcctccaggtgaggtgctgcccctgcctgggggaatcgttccagcctgggtgcctgtcctggggctgcaggtggagcccaggtactgaccctgctccccgcacctacctgggtcctaggagcaacctgccccatccaggtagaccttgctgagctccttggagcctctcactttgatcccaaggagaaggagctgaacatgatgctacttggctccctgctcacaggtcacgatccagacctcacaatcacctggtggtgcaccccccactccagccaggatcaaagagctgaattctccaggactctggctggacccacctgagcaagaaactgccaaaagatggggcgtttgaaggacctggagcacctacacaccccaagctttcctcatggtttcagttacaagatctgtgtttggagacctccccttgggggcagggaccatggaaaagttccagctgcaagcagaccagctgggagtggaaatcatctcctcgggctgcaccatcacggccctggaggtcaaagacaggcaaggcagagcctcagatgtggtgcttggctttgctgaattggaagggtacctccaaaagcatccctactttggagcagtggttggcagggtggcaaagcaaattgccaaaggaacatcacgttggatgggaaggagtataagctggccaacagcctgcacagaggagtcagaggatttgataaggtcctctggaccccttgggtgctctcaaatggcatcaagttctcgagggtcagtccagatggtgagttaaaagtctgggtgacatacacgctagatggcagggagctcatggtcaactctcaagcacaggccagtcggaccgccccagtcaatctgaccagccattcttatttcaacctcgtgggccagggttccccgaatatatatgaccatgaagtcactatagaagctgatgcttttttgcctgcagatgaaaacctaatccctacaggagaagttgctccaatgcaaggagctgcatttgatctgaggaaaccagcagagcttggaaaacacctgcaggagttccacatcaatggctttgaccacacgttccgtctgaagggatctaaagaaaagcaatttcgtgtacgggtccatcatgctggaagcgggagggtactggaagtgtataccacccagcctgggatccagttttacacgggcaacttcctgggtggcacgctgaaaggccagactggagcagtctgtcccaagcactctggtttctgcctcgagacccagaactggcccgatacagtcaatcagccccacttcccgtctgtgagttcaaacacaccccttggttctagttttctgtggcctaaggaaatgtaaagatatgacctgttccagggtcaggctggaagccccttcaggaacctgtctcctacgcagagataagatgaagatttagaggttttaaaagtgatcctgtgtattactcagccattaaaaggaaagaaagaacggcatttttagcaacagggatggacctagaaattatcatgctaagtgaagtcagtcagacaatgagacaccaacatcaaatgctatcacttacatgtggaatctgaaaaaaggacacaatgaacttctttgcagaacagatactgactcagagactttgaaaaacgtatgctttccaaatgagacaggttgaggggtggggggatgcactggggttttgggatgatcatgctataaaattgcattgggatgactgttgtacatctataaatgtagtaaaactcattaagtaataaagaaaagaatgtaaaaaaattaagaaacagaaaaaaaagtgatcctgtgaattaaaattacacaaatggtagttgtcatgataatctgaatattgatttctttcacaatgactggctccaggccaagtctaatggtcagctctattctctgtgtagtgaaaaagacccaaccatcaatgtcatcttctaagccctgaccctaatccagaagtggtacccagatccttgtgttggctctgtctctccactctgcttcttttcactccttctttctttgatcctactcattcctttttcccttcctcttctacctcataccaccttgatctgtgcagcactttggagttttcagaggtcactgagctcattcaacctggtggtagagggacctctctgcctcagtaaaagaatagatgatgaagtgagccacctgagaattaggggaggtaaatgacccacctaaaggcgcacagccaggaaaaatttagcctggattcaagatcaggtcatgcaaattcaagtccttctttgcctccacttcagtcttccagagcattcctggagtcattaatgggaaaagggggggtctgacccttactctgttaaagccagaccttctttccagatatcacttttataagaagccctagtcagagtttaaatgtatctctgagccttataaatagtgtgacttaaaatacaagatctaaatatccagaaaaaaaaaatctgtgaatttgattctccgcctttggggttactaagaaagcccagcctagccaagacatgggaaggaagccgctggagacaagagctgtgtgagttcgaggagagggccttgctgggactgcacgctgcaccgagagcagactgtatttggtatacgaggcggagttccctcctctcctaaacaattgaatcacgagtgatgggtttgtgttgatggtttttaaagaaatgttatcttatactcctctacactaataatcagttgaaataaaaccaaaatgtgcaccctcagaaaaaaaaaaaaagaataaaaagaaactgccaaaagactgacagcactaataacaagttatgaagctgaaagaagcttctcaaaactcccaggaataaaaagcaaccactgattaaccatgctagaggcagaactgatttgtcttcctttttgtctctcttaaaaatgatactacaggagttcccgtcatggcacagcggaaacaaatccaactaggaaccatgaggttgcgagttcaatccctagcctcgctcagtgggttaaggagccagggttgctgtgatctatggtaggtcacagacacagctcagatctggcgttgctatggctgtggcgtaggctggcagctacaggtctgattagacccctagcctgggaacctccatatgccatgggtgtggtcctaaaaagacaaaaagaaataaaaatgatactacaaaaatcatcagataaagagatagttcaaagtatgcagccaaaatatgagaggtacatcagacagctgagtaatactaattatttttatattattttcacgtgttatggttgtttttctgaatttggtcctatttagagtattggtcagtctgtgttagctgttgggatggcacctcatattctaaatgcagtcagccttctgtatccatgggtcttacatccacaaattcaactaaccacggatggaaaatactccaaaacatcacattccagaaagttccaaaaagcaaaacttaaatttgctgcatacaggcaactatttgcgtggcatttacattgtattaggaattataagtaattgcaaggtgatttaaagtatatgggaggggagttcctccgtgggctagctggttaaggatccagtgttgtcactgctgtggcaagggttcgatccctggcccatcaacttctgtatgccatgggcaccgccaaaaaataaataaataaaatatatgggaggctgtgggttatgtgcaaatacgatgcccttttgtgtaaaggacttgagcgtcctgggatctggtatccgtggggtcctggaaccaatcccctgtggatacccaaagacgactgcattcaatccccagccaaatcatgtgtctgcaaatttgtgttcccttttcttaaagcaggccctcgatattgaataagcttcctgcagcacttggatgccccccagctgaaccagaccaggcctcaggctaaacgctttaccagaggtttctcagataagtctcacaacgtcctgtgaagtcattctagtgttatctccactttacagacatgcaaatggaagctcagaaaggtgaagtgacttgcccagtgtgtcacacagcataaagtgatggagctgatattcaggtccagagagctggcctcagggcccacccttttaactattctcagtaaacatgaagactcacccatggactaatcacccagggatctttggcacatcctctcattttgcctttcacgatgatcacttagcaattgacccaaagctagccaatcatgggctagactcagcaggggccagcttctcctcggcccagctggcgagcattggctcaactcctctgccatttccaggagcctcctgcgtgcctggtgtgagccttccccatgcacgccatcctattcacccctcatcatggtcagtgcgggggctttttagctgaggagaccgagctttagcaaaagctgagatcgctgggctcccccacaaggggggcgctgagtttgaaaagcagaccctctgcctcccaggcccagctcttggccgggggatggtgctggggggaaggagggagagtcctgctttatctaaaacctctttaaattggcttgcattacagggaaatgctccctgttggaagaaacatggtataatttggggggcaggggtggggggggagtagtgcacggaaggctgtttccagttatgtttttcattataagggtcaaagcaaacacagacgcaggaagctaagagacaagcctcagactaaacatacgaccagctgtcgctccagccatcacagacctgttctcggagggacatcttgtaggcccctttcttgaatccccttcaaaaatctgaagcctggatccagccagcttctccttgctgcctggctcagaaatcatggtgcaagagtttttccaagagaaatagggcgaggtacatgaaggatcggtgctgccctgagagggcactatgtccgcccccagcacaggtcccgggcctgagactcgtcctcctggccccacaatggcactgtgtggcccacacagagaaccccaggctgtagccacaccccgtgaggtcctgccgggcagccaacgaaagcagaaccaacagtgactgagccagcatcctgccagctcccactcctagatccgatgccggggactggaggactttgtcttctttcagaacaactggggggagcagcaagaagtcagggggagaggggggctcctctctccacgctgcagccagctcatgatacccacccccccggtgaccccagcaaagcggaggcaaatcatttcaacgtttcacgtacctcatcctctgcttctctccccccagagtaaaaggcgaagcaagttctagtgagctctgctctgcagaaggaggcagggctgggaggaagggaaggtgctgcgttccaactcctgtcaaaagaataaacagcggtttcacgaagaggagcgcagacggatcccacagcagccaggggccttgttcctccttgctcgccctgggaagtgggctgtttatcaggcctgttgactcagagctgcatgccaaggcagagacgtctctctccggcccaggatcggcccggcctccttcactaagcgaaactacaggtccaaactaggcctggtggtggaggagggacagccaccacccttgggagagacacacaggccgcccacatcacccactcctcggcgaaaatgagaaccattctgaacccaaaccaccccaaatgacaactagcagggacagccaatggagaatttaaaaagaagggggcagaaaatggagaggggtggctaaaggagagcatcctcaaaactcccgttgaaatgctaccttccgagcctcttgttcgcatcctttaggcttcagaagttgttctgtttgaacactatttttatagaatgttctgagatctcctgcatggcaagccaagctataagaacttcaaaaggtcactgaggcccaacccaactctttggctgaataatgcttaaccctccccacacccacctcctgctcccaaaatagaatttcctagctggaagagacctcacagcagtggatttgtaaatgtcgcaacagctaaagctttaaaaaaaaaaaaaaaaaaaatgaagtcattctcagaaccccactatgtaaaacagaggacacagggggctttggctgaaggagggaaatgaagtaagtaggggctcagagcccccccacccattcttcccaagtggccccagacacttcctgggagtagagcctagaaaccccagactaaggagaaggggccgaaacctgacagaaaggagccaagaactgccccctcagcttccagcggatggatgcctaatttagcttctcactcctgttctggggaagaaattcaccgccccctcctctggggcatgagctagttgaccacagtcttcaagatctgcttaataaactactgaaatcctccctgctggcatctactaaagctgaaccaaccacacctcatgttccagtcattccgccccagattaatacctgaaagcaagtgcatttaagttcaaacagagacgtgacctgggaccaaaagctggaaaaaccccaaggcccatcatcagccagatcaggtgtggtccaggtgagggtcacacacatccgtgagaaggaaccagccacagctgctgacatcaacagggtaaatctcacacatggtactgagtcaaagcagccctggatgcttgcatttatttaacgttcaaaaatagacaaaaccgggagttcccgtcgtggcgcagtggttaacgaatccgactaagaaccatgaggttgcgggttcggtccctggccttgctcagtgggttaagggatctggcgttgccgtgagctgtggtgtaggttgcagactcggctcggatcccacgttgctgtggctctggcgtaggctggtggctacagctccgattcgacccctagcctgggaacctccatatgccgcaagagcggcccaagaaatggcaaaaaagccaaaaaaaaaaaaaaaaaatagacaaacccagggagttcccatggtggctcagcagaaacaaatctgaccagtatctacgagaatgcaagttcgatccctggcctcactcagtgggttaaggatccagtattgccaccagctgtggtgtaggttgcagatgcggctcggatcccatgttgctgtggctgtggtgtaggccaacagccacagctccaattggacccctagcctgggaacttccatatgccccaagtgtagccctaaaaagacaaaaaaaaaaaaaaaaaagacaaaaccaatctgtggtgccagaagtcagagtgggagtggtagagactgggaaggggaggctcagagagctgctgggggagggggggggcttgtcatgttgtttctcgagccaggtagtggttatgcaggtgtgtccaccttgggaaaatgcctcacaaacattccctttcagtgtgtgtgttaaaaacaaagatgcacagaaatcttcctgctggaagctgccttctcttgggaattctgacttcccctgagtctacagggtctcagggccacagggtcatggatagaccccgttttttccttctcttgggttcaacgccccaataccaagcaccacagagcacctaagtacggactcagggaagatctttcacattaaatgatgcaggcagctggactgtggtcaactgggagggaaagttcacagcatttggaggctcaggaactgggctaagataaactggtcctttcaagaagcaagcacccaggagttcccatcgtggctcagtggttaacaaatctgactaggaaccatgaggttgcgggtccaatccctggcctcgctcagtgggttaaggatccagtgttgccgtgaactgcggtgtaggttgcagacgcggctcagatcccacgttgctgtggctctggcgtaggctggcagctacagctccaacttgacccctagcctgctgggaacctccatatgctgcaggagcggccctagaaaaggcaaaaagacaaaaaaacaaaacaacaacaacaaaaaaaagcaagcacccatcatggttgccaccttccagtttacaaagcagcctctctcctttaactcagcaaatcctcaggctcacccgccccgggtcagggaagggagggaggcactgggagcctctgtgacttgctcaaagttgccggctggtgggtctgatgctgcccttcctcctgagctgcctctggggaacaccctacaggttcgtggaattagaggctccaggctcatgaatcagagcacgacagagtatgcaaacttggaaggcagaaaattcaacttccagaggatccgacatgaccttcctccttctccgacataccctgatgcccagactctcaaaacaaggaagcatgtacttccggtcattccttcatggagaggcagggaactgtagcaagtgagcctcaggtctgctgatcaaaggaggccagtggccatccaggtaggagtttggcacgtttcccagcccagccaggccgactaatctcatcactcaatgttccccaaggccccttccagccctaacagtccataggcctgtcagatgacagccagcattcagagcctgtccatctgccatgtcccctgcagaggagtgcagggccttggagctgcggctcagcagctgcagcccaggtgtgaagggtcccggcttcatgccccagaccccttccacctgagaaacacaaaggtccggattcccaccctgtgggagagggagaattaagtgttcttggcaaaaagtgctacagatacaaagattgcagctgtcacttttaatcctaaatacgtttagggcaggtataagacattcttgctgtcacttgtgagtgatggagcagtttagttggtttcctcttccgtgtggtgaggataattataatccccaccgctcggggtgggtgaggggcctagagcaccgtggttatgaatgtggactctgggcccaggctgccggagttcgagtcccaggcctgcccatgtgcgatcctgggcaatgtgcttaacctctctgtgtctctgtttctatggctgcacaatgggaacaacagcagctggatggtagctggcacatggtaagtgtctagagatacgtattacccgatattgcaagaattaaggagacacgcccggaaaagtgcttgaggtgctcaatcattgtccgtctctgctgttctattaatccgaggctgcagctccttggagtttacatttgtgtatcaaatagtcattttgaccacgtaaccctgcaggtggggaaaggtacggagggaagggttcctggcacgacgtttccgttactgttaagtactgccccccacacacgcctgtgagtatcagagctgaaacgatcttggcaaaagcccacataataaataacggcagtcaagagaggttgcatctataagtctatttccttgagaagagctggaaaaatgaaatcatgatgactcttcccaggccagtacattgctaatcatcttgagatctgcctctgccccaggtaactccaggacagactccaccaaagccatgctgaagcactcctgcctctgcaagcatccatcctgagcctcagccctcctcctgcacaccaggaagtccctctctggggctcatgtcagtccttcaagctctataggtcagactcttcctagagaagaaagaagctggctttgttgacagctggggagatgtgaggcgctcccacggaagggcgaggcccgggtactgatgacaccctgggcttgagcaccagcacaggtggctggaggatttccccacccaaggaaaccgctctattcctaccctctcttggtccttctcaccccttcctcaggccaaggaccccagatggaggtgagaaagaagcacctgctccttattcacaattgggcagtaggtgccagggggtacccttgcccccgaccccccacagaagttctcactctttcctcagtagagagaacctcaaagtcaggtaagtcagctccctgcctcaaagcaggactgctttttgaacacgtgataagctcatcttccgtcaaggtcacacccacgccccgtttagagcccactgccatccacaaaagccacataacatagaggctaagtaggagaaatattacaagcccaagttataagaaagggaactgaagatcagggaagaaacttacagagtcgtatggtctgagtcagcagccctggaatggaagacaagtttggggtctttctgtgagtctgtcccacctcagcctcgtacacccctggtggtggtgaagccagaccaagctggggatgctaacggaagcagaacaagaagagggtcatgaaccagattccactagaacccaagttctttggggggtgggagggagcacttgtcttctgtcttggtcacttctgggctttcctggtacctggaacagtatttgacatctatcagacgttcagtagatatttgctgaattaatgctgagtgaaagcctacaggagccaggcaggcagcagaagtatgtgaatttgaccaggtaaggatggactgtgataaactagccaaatcagatcaaaatcagattttaaaaagaaaacaggtttcccattgtggcttagcagaaacgaatctgactagtatccatgaggtcttgggttcgatccctggcctcgctcagtgggttaaggatccagtattgccaccagctgtggtgtaggtcacagacacgtcttggatctggtgttgctgtggctgtggctgtggtgtaggccgcagctacagctccaattcaacccctagcctgggaacctccatatgccatgggtacggtccttaaaagacataaataaataaatgaaaaaagaagtacccttctttgattacagaatgtgatatactggccatagatgactcctcttttaagggaaattgttttgtgccagaagcgaaaagtattgtttgaacccttgctccccaacctaggggatgtaggcgtgtctgtcccttctctgtgcgtctgttttctcatctgtgaagtgcaaggtccctcccatttccactccatcctgcctgggcctgagtctgagggtagagttgtgaactgggctcctatagcagtctgactgggggactcagaaggcttcatggaggaggggatgtgaccagacctttccagatgggcttcccctgcctcccagggatctggcatatcagcctgcacagccactcacccttctcttccttctcactgaagacaggctgaaaaactaacctgccgggggaggcaggcagccccacacttcagaatttataaatcctcctctgctcaggctcaggcccagtccatcctgggaggtgctggaggtcattttatgaaccaaccaccttcggctttcggggcgtagggatggggcaggatgccacagaatcaccagcccactcacgagcccccctgaacccttcccagggtgacagaaaagaggaaatggagcacaattccggccccaagacaaagaaactcggccaagcaaagagaagggaaacagcttcctgagtcaggggacttggaatctgctagggccacagggaaccttccccccatcatggtgaggctgaggtgtggactcaagcaactgagaagataaggacaggtgggtccgcccccacccagctcagcccagaagcatttctttccaaagcgcccgtggaaaggagtggtttgcagtgaagaacatttttcaaaaaaatcgaagtctaatactaataatataaccagataaaagaaaggccaagaaagtgccatataaatccaaagacacggttccacaggccacgtggccacaggcacatttttcccctcctgggcctcacgccccgtgtgggcactgacggagtcgaagtggaacattcccaggacccacctgggctcggtggctgtgaagagcctgttgttacttgctctgcaaacctggctgatgaacatgcagccttcagagcgcaaggtcacctcctccaagatctgcctcctggcacaagtggattctcacagccctggtgtggcctgctggtttcacggcacctagagcgcaggttcttggacatatgtccatctcactctctgcacgcacattctcaagggcagcagggaagtctgctttaggtcaaggtccctggtggtcctcaccacagggtctggtagagaggaggtcttgaggatcagtaggctggtgacagatggacagatggacttgctggggctactgtaataaagcaccacaaagtgggtggcttaacacagcagaagtttatcctcttatacttctggaggccagaagtccaaagtcaaggtgttagcagagctggttccttctgaaggtcatgaaaaggaattctacaggcttctctcctggcttctggtggttgccagccacccttggcattccttggggcagcataacccaacaccgtctgcatcatcacacagtgttctccgtgtgtgtcagcctccaaatttccctctctttagaaggacaacagtcactggattggagcccacccgaatccagcatgacctcatcttaatttgagtcatctgacaagaatctatttccaaaaaaactcatattcataagcactggggattcggacgtgaacccattttttttttttggaagacacaattctacccactagagaccgtttcccaaatgcctattggctgggagcgtgtaaacactagcagaaccacctgtgagggtggaaacgctgcatataattacggagttgaaagcgaaagtttggaggcaggcggggaggtaggggtggtcttgagaaagaggaaaacatcttagagcatctctacttggccaggattataggaagaagagaaatgcctccccgggacaggcatctgtgggatgtcccgccgaaatgctgccggtctgtcaatactcagctctgggcatcacagagccatgaatgggtaagcttcctcccaagaggagcaggatgtgaaagaagagggggccctggggcagctggaaccaagaacctatggaagcacagagctgggcaccagattgcagtgggtcaaggaatgaaggtcaggtgagaaagtgacgtgcaaggacctctcgccagcagcttgccttgggaagggctggagggagggtgccagctagagacacatggagcaaaaaggaaatacccttgagtacactgctgataatgaaaagcccttaatgagacagagccgaggagaggagggtttgaagattcagaggagggagaggatgggggctgaagagcatctcttggcggggagatgggggtgccaccaagacaggctgaaagtgctccccctttttgaaaggagcaggagacagaatgggtgggttggcaagtctggggataaagcgggtaggtgacaggctccaatccagagcagctgaagcgaggagggagaagggggccaggaggcagagaagctggagagctgtgcagaatctcatcaccaggaaccttgaacttgcacctgaaaaatgggcatttcatcctgaaagtactagagaatccttgaatgccactaggcaaagaaagttacacgatttgctttttagaagacttccttggctgaaggatgagggagcccagccaggaggctgctggccaatgtcagaggaaagagtagagacctaaccccacaggtagagctggaagacaagaaagaagtggcatcttgagacatagggttacatctatcttactttctttctttcatttttttttttttttttgctttttagggccacacccacagcacatgcaagttcccaggctaggggttgaatcgaaactgtagctgccagcccacgccacagccacaacaatgccaaagccgcatcttcgacctacactacagctcacggcaacgccagatacttaacccaccgagcaaggctggggatcgaacccgcaacctcaaggttactagtcggattcctgagccacaataggaactaccgggtcacgtctttgaaaatctgcttcagtgttactttagagaaactgtcctggatttaaaattactttccttttgtagttatctatctttcaattttatttcttcttctaccagagtgtcaactctgtgggcagatatttttgtgcgtttggtacctgtgtggaaacatctgtctattacagcccctggtgctccgtacagctttgtaggctaaaatgcatgcctggtacagtgcttggcacctgtgtgttcaataaacatgaactatggtgataacaacagcaagaataacagtgagcaatgggatgaagggagtgaggcagaaatgagactagtttggtgggactcaaagtgtggactgagcaaccggtagcatcagcatcacctgggagcttgttaagaaatgcagagcagcaggcccacagcccaggaacctgtgtctgcatgaggtctgcaggtggtctgggaatggggctggttcccaggtttctggttgaaggaggagagtgggtggcatcgctgctgactgacatggagcggcggggctgagaggagggggagtcagtgagttctgctcaagaggtgctgagtttgaagaacctgcagaagtcaattcagcaatgttgtcccagagagagagcccggggagagcccagtttcggagctgccagcccagcgtgcaggcaggagtcggcaggtcttctgtgtgccaagggaaaggagcacggagagcagaatggggcctccttaatgggcaccgccttgaaatctgaggggcagggccgagaggcaggaggagaaacaagaacaaaagttgttgctgggagaaaccccatctgaattctcagctcagctccacccgtgaccgcctctggccctgcttcccctggaagagggaaggccacggacaattgctcgggcaaggttgctgctgtttgagaatcccaaggagcgggactgtcaggcaaacagaggggtggcaacagagaggggtcccgtttccagctgtacctccaactccggcaactccctgcgtgcctggttgattcccgcccccttcggatgacaaggtggggccggggtctctgaccatgttgcctgccagctctctgggctcacccctcatgtccggccacagactctaggggaagaccccagcagagcataatggcagctgccttcagagcacgtgaggaggctccagaggccagaccaagaggtgagggaagggcacgcagggtaggaagccaggattcccgagccaacaggtgtgctctacctggctcccatcagtacagctgagagtcaaggtctaaagaagcctctctgtccctcagccaaaaagggaggcccaggaaccagcaagggccactctctgcatttatcaggtcctagtctggcgagagggacacgtgctgactgcagaccgcagctactgcagttgtgttcagtgggctggggctggcagagtggggctgcacaggtgtcccccggaggaagtcccagctcctccctgccccatcacctgttgtattttgctttaccaccctcccatttttgccatttgtgcttggccttgtcacagcaacccctcctggtgcaggtagtttcccagggcctctaaaatcaaggtgcttcccctagaacagttctgatttatacttgttatggctcaatgttttagtacctcctttcactttcaaaggtgtgcaggtgtggaggacaaatcatgttgcctgtcaccctacataaaaacggttcaataaaatagagttcgatgaagtccccttcaagacgcctctcggcttggaccctccaggagtcagggcttgtgtttaccaacagccggtgccgtgacctccccctctccagcatccttcctgctactgcctgtggtacaagaggtggtaaaagcctttctgccacccctcccctaacctgtccccttcagtgcctgttgctgggatcatctcagctccccctgcctccctgtgtaggctgggaggaattaaaagtctaagaatttactggaaaatcctaaggttgttttgtcttgggcttttttcccccctcactagatttttttcttgtaacaagttgacgagcataaaagaccttccaagaattaatctctaatcatgagagatttccttcctagtggaaagctaaaaataacaaagacaacaacaacaacaccccaaaacctcttaactgagcccacaatggagatggcttttcctctgcctgttctttgtcttttgccatttttttttttttttttaagggccgcatcagcggcatgtggaggttcccaggctaggggtctaattggagcgacagctgccggtctacaccacagaacagcaacgccagatccgagccacgtctgcgacctataccacagctcacggcaatgccagatccttaaccccctgagccaggccagggctcgaacccgcaacctcatggttcctagtcggatttgttctgctgcgccacgatgggaactcctttgcccgttcttggaaagagccaggccccagttcaaatgccagtggcgccccacccccaccccccactttcttgctgcgaagccctggctcagtcacttcacattccgagcctcagtttactcatctgttaaagagggatgataattccttactccttgaattgttgacaagatgaacagtctgtaaagctcctggtaggtacttgggaaaaaagcaacttgtattattatcgctggtccctaagagacaagcactgtccccacctcatcacagtgacaggaggcagtatgcccagagattagagcttgcacttgagcaagacaggcctgggaactgactaaatgcgtgaccttgggcaagtcactggaccttctaggacttgctttttctcctctgtaaaatgagaataacagtgactcaccatcggtgagatgacgcacatcaagcttggcatgacccctgatgttgcagcaagtgcccaatagatggtagtttctcaattcccaatagtgattattgcagaactctccacctcacaggctctggcaccacctgctctgtatctccagggtccactatgttcccctgtccccaaaacaacagcccttcctgtgcagggggcatttacaaatccacctttccccttccgctggagtctgagctgcagcccgtgagtcaggctgggtctccacgtgcggaggaggaggtggaggaggaggagtctggtaactccccaaggggggctcagctgggactggaagctgggtttgggtgcagccaagaatttcttcagccccttcctgtcccacagggagcctgattcagagttgaagggaattacgtgtttgtttatttattcattaaataaatatttaacaccagggagttcccatcctggctcagcggttagcaaacccaactagcatccatgaagacatggattccatccttggcctcgctcagtggtttaaggatctggcgttcctgtgagctgtggtgtaggttgcagatgcagctcagatcccgagttgctgtagctgtggtataggccagtggctacagctccaataagacccctagcctgggaacctccatatgctgcaggtgtggccttaaaaagacaaaagaagacccctcccccccaaaacttaacaccaatgttgatacctaccacgtgccaggcaccattcaggctgctaggtcaataaggattagcctattctgtgcctttctcacagagctagtgggaagtggagcccttcctggtgggaagctgagcccggacagcaacacttctacatcctgaagccaaggtgagtgtcctgtgacagcaatgagtcagcccctctctgggctccatggacttctggaagactcggagagcaagctcacctgcctccttgcccgtgtggctacaggaacatgtttaccacccagggtcactctctctcaagcatggccccaatcttctgagctgcctcactttccagatgagaaaactgaggcaccaaggcagggaagtaacttatccagggccacttggtgatgaggtgaagaggccagggctagtacccaggtatctggcatctctctaggctgagacgcctattagccacagcaccagaaatcaagagcttagagacggggcgaagggctgcagtcaatggtcttcttctagagttttcttattaatgcccaggaaaacctctgatgggacatagaaatgccactgggaaaaggggagcatcgtgtgtttactggagacaagtgaggcacccaattcaaaaagaagatccctctcaaacataaaatagttcagcaatggagtaaaaaacacctaaatatgtgttccacttacaaagcatcctatgggctgtgatgaagaatgtggtttggaaactccgattccaccccattgcctctgccttcacctcccaccccagtgtttagcaccaggagctcccagcacatatcacctacccttttcctggctgctgtcttcttcaatgagcttctgcttttgattcccctagagaggctggcagtttcgggcacctttttgttcctctgcttagcagttggggcggagaagaagtggctttggggtttttcttctctgggtgtggtttcctagccctcacaaaggaaagcctacagcctgctctgtctgcaccaccagcctggttgcctcagctggcagagctgattagcatgcgaggtgcagaagggaacagcctgcctggggtactcaggatactgttctactaaatgtttcctgctctccaccttcatagtaggatttcatttcctggtccccttgcagttgagtagggccatgtgactagtctgaccaataagatgtgagttggcccaagtatttaattgctggtcaaagaccctccagggctctctttctctgtgccatgaagtatattcaaggacgtaactgctccatcagcctggctccttgaatgaggagcacagcccctagctgacccacggggctcatgttaattagagtaagacataaaccgttatgggtttggccccaaagatttaggggctgtttgttactgtagcataacctacaccatcctgactgatacactgcccatctcacacagagtgagatattccctagttaagtctaccatcttcccaatgttgctctttcagccagaagccatttcacttcctctgagctccccttggcctcctgtcacacttctgttctgcactctgacttctacttttagtcccttatatataattacatacagccaatttcacattgtgagcgcctgaagagcaggaatctgtaccttatattatgatgatgataataataataataataaacagaggcagcaaatgctactatttattgaatgctgggctgggttctaagcacttgacattcattcagttctcactaagctctgagaggtcagtactggaactacccccactttacagatgaggaagcatctcagtttggttcagctgaaattgaacccctaataatatatatatatatatatatatatatatatatatatatgcattttttttttttttggtcttttcctagggccacacccgcagcatatggaggtccccaggctagggatctaatcagaactatagctgctggcctacaccacagccacagcaacaccagatctgcaacctacaccacagctcacggcaactccagatccttaaaccactgaatgaaaccagggatcaaaccggcaacttcatggttcctggtcggatttgttaaccactgagccacgacgggaactcttaatatttttttaataaatatagttcaacttaagtcattccctctataatcctagtcacttatttttcacatttaaaacattcccagaaggggtctataggctcccccagatgccaaaagagtccatggcacaataaaggttaaggtcccctgtagaagcagataccagggttacagtgacagggttctgtcccctgttctcctggaacccagagtttctggctggtggagggtaagggaccctacaccaaattcatgccacagtggggagtgaacaggagctactttattgtattcacatagcataaacataaatatcgtaggtttggcatatggaactccctgtcatgaatattttgatttcagcagtgtcagcccaagtataacattcatcacagtaaagaagtcacttgtttccccagtaaaaaaacaaaacaagggcgttcccttcatggctcagcggttaacaaacctgactaggatccgtgaggatgcaggttcgatccctagccccactcagtgggttaaggaactggcgtgtaggccggcagctgtagctccgattcaacccctagcctgggaacgtccataagtcgcaagagtggccctaaaaggcaaaaaacaaaacaaaacaaaacaattcctaacatccagtgtgctaattagaaaagcatcagctcttgatcacaaattgggataacaggacagcagccatctctggtcagtcccactcccagacgatgcatccttgagggcagatgggccgaccacccacgatgagacttgctttcttagcttctgagcactggcttggtccaagtagcactcacataatctcccatattgtatatgctgaagttttatactttattgaaccagaatttactttaaattccaggcatccaaacatatacactgaatccaggtgaatccaagcagaactctctggatttcagaaatcctgggtgattacaagactcagggataaggtagcagagccaatgctctgtgcctccttgccagctggccagtagtgagggctgagccccaggacaaccgggtggcagtctggcactgccctggtgggctggatgaccttccgcaaattacaggctcagttttcgtatcctccaaatatggagccatactagatccaagtccaggcaagaaacaatcacaaggcacccgcgctacgcctagtactgtggggaaaacagaaattacacaaactccataaggagcttacattctagttggggagccaggcctggaaacaatttaactattgtgcacgacagaaagaagtaagtatgaaggtggtggaagccccctcttgtgctctgggaccacagaggaagcacgaagccaggctgcataggcctgcgcagctcggtttcaaagaggaaggggctatgcttgaactgggcttcagagggtgagtaggagtctgatgggtgaggaagggcatacaggtggaagggcaaggatctgcaaactcggggtctggaatgggaagccccacccccagcccagatcccagcccaggggttccagtcctgctctctccacacatccgctgctttggaatctggaagagtcctggaaacctgtattttgaacaagctcccacagtcattctcacaagcaggcagtgagtgttatagattgagaaaaatgaatgaacaaatgaatgaatgaatacaaaaatgaacctgagaagttcctgttgtggctcagcagaaacgaatccgactagcatccacaaggacgcaggttcaatccctggacttgctcagtgggttaaggatctggcattgctgtgagctgtggtataggctgcaggctcagcttggatcccacgttgctgtggctgtggtggaggctttcagctgtatctctgactcaacccctagcctgggaacttccatatgctgagggtgcagccctaaaaagacaaaaaaaaaaaaaaaaaaaagaacttgacttccggtaagtccctttctctcttaggatgtccacactacattaaggagctaaagagcttcagttgtggctcagcagtatccatgaggatgcaggttcgattctgggcctcgcccagtgggttaaaggatccagtgttgctgtgagctgcagtgtaggtcacagacaaggctcagatcctgtgctgctgtggctgcagctccgatttgactcctagcctgggaacttccataggccacacctgcggcccttaaaaaagacaaaaatgaaaaaataaaaagcaaaataaaagtgctgaattggcctggtggctttcaaactgtgttccagaaaaaccccagaatctccctgaagtccctcagggacacagaggaactggggaggctgagagagccggactctgggccccatccacccttctcagattacctctccttttatctctttgctcttttttttgcaataaagggttcttggctacaaagaactcttaaagccactgaattgaataatcctagaattcccaaggagtcagagttcccattgtggctcagtggttaacaaatctgactagcatccgtgaggacgcgggtttgatccctggcctcactcagtaggttaaggatctggcgttgccgtgagctgtggtgtaggtcgcagacgcggctccgatgctgtggctgtggccagcagctacagctcctattcaacccctagcctgggaacctccatataccaccagtgcggccctagaagacaaaaaaaaaagaatccccaaggagaaatttaaaaatttcttgagggcagcagcttacctttggcaagtatgaagagagcataagggtctttttcagaagcaagttatttaatcatcacattttaaaaaccttttgctgtggcccagaaattagtgagtgaaggaaaaaagcaatgtggtataataatgcaagggaatattatgcaacctttaaagaacacttttgaggaatggttaatacaatggaaaataaagtgaggaagtcagatacaaaatttcatacagactgtgatttacggtatggattttttttttttttttttttggctacacacatgaaagttcccaggccaggaattgaacctgccacagcagtgacctgagccacagcactgacaactctggatccttaaccccctgcaccagcgctatggatcttatacatcaaaattattggacatggatgttagtaggccggtagctgcagctccgatttggacccctagcctgggaacctccatatgcctcggatgcagccctaaaaaacaaaacaaaacaaaacaaaaaaaagaagaatgcaattctgacatgtttcagcacagataaaggttgaaaacattacgctaagtgaaataagccagacacaaaaggacaaatagtgtgtgattttactgagatcaagcacccagagttgtcacattcaccgagacagaaagtagaagagcggttacgggggtgggggggatgggggtgggcagtgggaaattactgcttaagcagcacagagcttctgtctgggatgatggaaaaattcagatggttgacactggggatggctgcccaacgtgtgaatgtgcttagtggtaccgaactatgccctcaaaaagcattagaatggtttatgctatgtatcttttaccacaataaaaggggaaaaaaaagccagaactaggtgcataggttatagtggtgaatactatgcgacaagcttgtgggcagcgtggtcactttattctttgcatttctctgcatttttcaaacgtcctatgatgagcatacatttctttttaaaaccagacagaagagcgagttaattaaacaaatctcgtggttctctgacacttttgcccaaatgcgttactgtcttttgcgtaaatgtaaggtgtgttccctgtccttcgttaataaaaggagccgagcccaaggatgccaacgaaaggatacaccgaggtgctcaagtcaacgacaggcacagcggccctcctttctaagactcgttgctctcgtctatatttaataagttccaaataaaaacagaacccaaacaaatcctctaatgaacttcctaagaagctgtctggcttggaaaagctcaaaggcgaactgaagagaaagggggaacagctgctgtgtttttagggcattaactcactgcagctgggacagtgcctttgtcagtagatttctatcccttcttgcttctgggaaatgttcttgggcagaatgaattcagaaaccaggagaggctccccagtggtattccctgccaatccatctgctccagtaccctctccccaccccagaaacatgctgaacaaagatttaaagactcttggtgtgaagggcagccacgtgtctgcctgccagggtgccctccaccccaggccgcctgggtccacttgcccggctcctgggccctctgctcaggggtggcacaagggcagaaggtagctgccacgataagcagaccggggctacccctggagtggcccctccctggctacgtgacctctgcctttttcaaatgttctatgatgagcatacgtttctttttaaaaccagacagaagagcgagtaattaannnnnnnnnnnnnnnnnnnnnnnnnnnnnnnnnnnnnnnnnnnnnnnnnnnnnnnnnnnnnnnnnnnnnnnnnnnnnnnnnnnnnnnnnnnnnnnnnnnncgtatatggaccataccaccttcccctggccccaggttctcacctatgtgactgagggaggtggactggggcacctcttagatctctgccagctcacacatcctatgattgcatcatctcaaaaagaaaaagaaaaaccaacaatacctaaaccaaactaaaccctaaaaccaaaaccaaaagcagggtgccttctaggaatctaggccaggttcttacgtttgggggggccttggggtccctatctacaaaatgaggcacggagtttccaccatggcacagtgaaaatgaatttgactagtaaccacgaggacgcaagttcaatccatggcctcgctcagtgggttaaggatctggggttgctgtaagctgtggtgtaggtcgaagacgaggctcggatctggcgttgctgtggctgtggtgtaggccagtgcctagagctccaattggacccctagcctgggaatttccacatgccacgggtgtggcactaaaaagaccaaaaaaaaaaaaaagggaaaagaaaaaatttggcacaaccttccagctcgttccatgtccaacatctgtaattcctgaaaggaaggccccatcctccccttgccctccaccacgtcctctacctcaggccaggctcacaaacaggaaatatgacattcgagagcagcagaagcactgcttgcttctcgacagcataggggccgatggagaacaaagagtttctgagcttttccagcaacaaccagggctccatgcccaagaccttccccaagcagtgcaggcagaggacactgctgggatgggctggcctcccatgccatccccgccccggtgtgttcccaggggcccccggcagcgcagaatcagcagataagctgtctggccgtaattacacgctgatgcttgaccaaaggtggtaaaaccctaaacaggcggaaggcagggtgcaggattcctggactccagtgcaggagtggagtgaccctagagaggccctacccctctctgggcctgagtttccccatctatttttttttttttttttttttttttgtgtgagtgcgtgtgtgtgtgtgtgtatgtccccctctatttgaatgaaagggctagaatggggcctaatggcagctctttgcttgctccgaggtcttcggtttttcttttttcattccatttttttttttttttttatggccacacccacggcatatggaagttcccaggctaggggttgaattggagctacagctgccggcctacaccacagccacagcaacaccagaccccagctgccagatccctgaccatagcggatccttaaccttacaccacagcggattcttaacccactgagtgaggccagggatcaaacccgcaccctcatggatcctagtcgggtttgttacagctgagccacgacgggaacgcctgatgtcttctttctgaaggcagtgtgtggccttgatgaaaggccccatcatcttgcctgtgtctgcgtcccaaatctctccctcaccacgtgaccctgagaaactgctaaatctttctgtgtttcgtttgctcatttgtaaaactggggttgctgggtgatgaaaaggcagagctcctgtaaagctcctaggacagcttctggagttagcgcccaggaagcgtgcgctcttgctgttttatgatttctctggtttcagaatcgctccccttgccctgtttgccatctgaagaaggagcaagcatggcccagagagccatactggccctgcagtccacgtctagccctctccctccaagaaagcacatgtgaatcttggtcagccaagcacagtgggaagagggaactatgggagaaaaggcagaaaatcctacgatgctgccccacagcagatgggctcgggtgtcagctgctcccaggggttgctgggcactagagaaggcctccagctgcacccagagtcagtagcggagggagggtcctgggctcatctccagcttgatccccgaatggggaggagaatgaccccgtgggaaggagggtgatgagatgcagaagatgcagccgggtttatctctgttcctactttgccgggaccattcagggaagaggaggccacattcagtcatctcagccccgaggggaacagggaacagagaggggtgaggatgacagcactggtggtctctcccctggggacatggaggtgtggcctccctctgccacagggagggtcccaaacctgcctgtcctcagtgttctcacctgccaagggaggagacgcaaatgcctgtttccaccaggcgctctagggtctcaaattgtggctgcggacggatgcatcgaggaggcacagaaattgagagtgttttactaaaggaccagtccacaggggattagaaataaaggaagaaaggcctgatcttctaccacactgtcctaggacataaagcatgatgcgggagacaggcaggacccctgttccgcctcctggggctaccccgcttggctccagtgagctctgtggtccaggtggaattgtgggctcccatctggctgggacgactcacccagacagactgccctcctgatccgagagcatttcactcggcagcaaattcaacccacctcaaaatatcagctgcccctgatcaggcagggcctggctccctctctgccaagccccacagggctgggctgggatcagtcatggcagctcaagggaagtcacgctgcacccagaggtaaaagctgtcctggcagagaaagagaaaactgatggtcctaagaacaagcacactggctttcacccttgaggacgctcagttgagaatctcggtttgggagttcccatcgtggttgtagatggctctggtgtaggccagtggctacagctccaattagacccctagccagggaacctccatatgccgtgagtgcggccctaaaaagacaacaaaaagaatctctgtttggctgccctgtgtggcaggtatgcatttatcaggtatagagacattttacagatgaagggagcccaggggatctttgctcaaactcttttttttttttagctttttagggccacacccgtggcatatggaggttccaaggctaggagtcgaatcagagttttagctgctgccctatgccacagccacagcaatgctaaatccgagccacatctgagacctacaccacagctcacgccaaagctggatccttaacccactgggcgatgccagggatcaaacctgcaacctcagggttcctagtgagattcatctccactgagccacgatgggaactcccaaactcttttcttttacagataaagaggctcaaggaaaggagcaccttgtcgcagaagcaggatttgaaccctccaaggctcctagccccatctgcattcagcctgccaatccacggttaggagggccaactgcacacatgcgcagtgtgggatgtggtgaggaaccacacaggaaaagccctcagttctcacagagctcacattctaaacaaacaacaaaatcagtcattataattaacaaatcattaaagacataatttcaggtgggggagagggttataaagcaaatttaaaacctggcgtgtttgagagtgttttggggtgggggcagctgctgtttgggaatggcctctttgcactggatcctctcaggtcctcccaagccagtagaatgctggagctggctcctgctggcttgcaagggccacgtctcattaggaatttggcgagcaagttgttcaccacagccattattaaaaattaaattacataaacttagaactaaatgaattatagtacgacggaaggtaatcatcaaaagtcatcactccctcgggttcccaggtggcctagcagttaagggtttggtttgtccctgctgtggctcaggttcgatcccagacctgggaactttccaaggccacaggcacgtgaccaaaaagaaaaagaaaaaaaaacttcattaatttcctctttgtatgaccacatactatactcttgaagttgtttatatctattgaatctagacgtaatagatactcccagttcctccagtagtagctagaaactggtcatggtagaaatatgtctactatggaaactggcaaataccctctacgagggctttcacttttcaaagagctggtggtgaaatatttaccagcacagccttcagctctaatccaggccttctatgcctgtgggagtctgggttcttccaaggagagggtgtggtggtatagtctaactctcctggggctgggggcgaggggaggtggtgggcagtgcctccagccctgtcctcttcttcttctgtgtgtgtgtgtgtgtgtgtgtgtgtgtgtgtgtgtgtgtgtgtgtgtgtgtgtgtgtgtgcttttcagggctactccctggaaagttctcaggctacatgttaaatcgtagctgcagctgccggcctataccacagctcatgacaacactggatccttaacccactgagtgaggccaggggtcaaacctgagtcctcatggatactagtcgggttccttactgctaagccataatgggaactcgggcagtcagattcttaacccactgcaccacagcagggaccttcttcaaaagtgtttttcaacagggatctgtaagagggtgattcattccttcctttgttatttatttttgataaatgaaatcctatcataagcataccaatataaatttaaaggaaccctgccgagaatctctttgtataaatgcctgcagtcacttctgagttcccctagattttcataggtggagggacttccttagagaatataactgttctcattaacagcagactgaagttactattacctctactaataacaatgacaactgtagctgtcttttactggcaccacctcaggcactaggcacatatattatctctaaagtctacatcaacccattttacacataagaacgttgaggttcaagggttcaataacttgacctgaggccagcctgctgctctgaaagtttcacagaaggctttttccttctgtagcgacagccctgcgactctccttagacctgcaggattctgtggtcctacaggaccccccatctctggtggtttgggagaatttcgtcacgtctcagcttagtgtaaggaactcccttccatcagcagaacagaatgagccagacgctccccctggactttcttttttttttttttttttttgtctttttgctacgtctttgggtcgctcccgaggcatatggaggttcccaggctaggggtccaattggagctgtagccactggcctacgccagagccatagcaacgcaggatccgagccacgtctgcgacctacaccacagctcacggcaatgccagatccttaacccactgagcaaagccagggattgaacccgcaacctcatggttcctagttggattcgttatccgctgagccacgatgggaactcctccccctggactttcacctgcaatgcaggaaagtgacccaggcctggtcacttagcagcttcccacccaaaagaagtagcactcaggttctgataccagtgaaatgttaacagcggctccagtgccagcaagagctagaattaactcctgttgggagaccctaactgtgttaggtctgttgcctgacctctcctggttctgagcagcttggttttcaagctcccccaggaataccatgagcaacaaccaaaaaatccttccaaggcacatacctcttctgcctcggtgagctagaatctccatcggttgcttgtaaccacaatttctgacccgtacctcatctcaagcgcttctcaatatatcagccgcaaacattcgctgagcctttcatgccagagaaggagctcctaagcactcaattagtttgcacagaggaatagtaatcgtgcctttctgtgcacagctctggcataacctatgaaaacggagtttgccacacaaaatagcaatctgcaaacaaccacagctcaactgagagcaaatccaggcccagtccctgctccccgggagccatattccccctaaagaaaaccccttccttgattttgtcaacggtcttgtctttccccacagatgccaggcaagttcctcttggggacagctggccggccacttgaggacttgcgatttccctgacgtaggagaaaggacagctgggtttctgcacacagatgctgccaagcccaacgtcacccttctgggcagctgacccattgccccgggcttgctccctcccctgtgcccctccagacaccagggccatctggattctggaacagccatggggaagatcaggatgactggttctcaggacccctttcctttgcctgaaacgctcttcctttttcaccctctacatcctgcgggcctcagtttaaagatcacttcctcagggaagccctccctgaccacttccccagacaagttcagggccccaggaccctgccctgtttatctcctccatgtctctgtctgtgcagttcattgtttactgactatctccccagctgaattctagcctctgcacaggaagggattgcacctctgttcaccgaatctcaggttatctagcacagcatgtagttccataaatcctgaacgctttaaagatgagtgaaggacattctggcggctcagtgagcgctgaatgagtatctgatttaaagcatgcatctcagcaacaggtgcatcttttaggaccaccgttttctggtgcccaaactcacaagggcagggtgaaaatttagccatccctacttctccccgggtcgtttttagtttgaaggtttgtttcctgtgggttgggactggcccgatttttgtttaacagcagctattgctcagagaggagtttgctagatgccagccttataccacctggttgatggggaaactgaggcccctaccactggctgcaccagcaccggcggggcgagaccagctctctttcagcccagagctcatttcagggtccttcgccccacatggggccaagtccagggcatgcgaagcaaggctcgggaagataagggcacccagacggggatggagtttgaaacttttattaagaacgaatcaagagggaattcccttcatggctcagtggttaacgaacccgactaggatccataaggacaagggtttgatccctggcctcgctcagtgggttaaggatccagcattgccgtgtaggtcacagaggcggctcccatctgtgttgctgtggtgttgctgtggctgagatgtagtctgacagctacagctccgattcgacccctacccggggaacttccacatgccatgggtgcagccctaaaaagcagaagaaaaaaagaagaagaaatcaagagacctggcctctctctctgcccagcctcttccagctgctaccttccactctctccggctagtttcaggttgagcaaggccaggcaggagccctctcgggggctgagcatggatctgggccccagcagcgcccccaaccttcagattcaccttcactctccttgctcagggcccaccagggtctccaagccaaactatgtttgaagtcaagaccaggctttcatgctttggttctgccacttcactcttgagagatggtggccaaacaattaaaacgctgagcctcaatttccctgcctgtaaagtgaggaggcggggggataattcctgctttgctgacttcatagggcttttgtgaggctcaggcgaggtagatatatgtactcactcgtctaactgtccactagcttagagaactctaacaacaactctaggagttctggcagtgggttgagaatccgactgcagctgctcaggtcactacagtggcacgagttcgatccctggccctgtgcagtgggctaaagatctagatagagttgcggcagtgatggcataggttgcagctgtggcttggattcaatccctggcccgagaacttccatatgacgtggtgcagccgtaagggaaaaaaaaaaaaaaaaaaaagatactgtttttctggtcccattagggtcttgcgatcaacgtgtagccagcccatgtcctccagggcccaatcctccacccaacctctcagccaggctctcctcttgaccacatccttctagaaatcctttctgcctctgccttcctggatgtgctccctctgggctctcctccatctcaggtcactcattctcccagttaggacctggcccacctggcagctccgtgctttttcctgccattcacgtcagccaaccacacagggcctgggacaggaactgcagggaacacataccaacactcagatccctggataaggcttgcgtgcgcattccctggggcacaaaacatgcgcacaaagcattgtgtccccaccccactgccctcaccacccctcctttgctggggcatagggcagaacccacagcagacggaaattcccaggctaggggtctaattggagctacaactgccggcctacatcacagccacagcaacgccagatccaagccacatccacgaagtacagcacagctcacagcaacgccggatccttaacccactgcgcgaggccagggattgaaccagcaacctcatggatacttgtcagattcatttccactgtaccccgacaggaactccaccactcctcctttaagagactctatttggcaataaagccagagccaaggctctggcaagagttgcagccaggtctgatcataggcagccaaggtctgtggccctccaagccgggctgggacaagccaagcagatcagctcctcggctggagatttcaatgacatatttttaggtcagcctctctttagaattgcaaggacttttataaataattctgggttaagtatattccacatgatgacccttctgccttcagtccacagtccaaatctacatcactctctggtgtcccagactgacccacctggcttccctctctcaagactaaggctgaagcttttatcagcagaccttgcagcccagggcagggggttgggcaggggggaaacgactttgccccagttgcccttgggaggccacttacccacaagtgtgggttaagtaaagggcactgcggtcacatgcccagtgtgccatctggcttcagcagccaccgtcaaagagggaagaaaaagtgacatgcaacagaatgtaaccggggcatggcctgcaggatgcccagggacctggggggcagaggggtgccaaattcatggggggcttctcagagagggtggtgattaagatgggccttgaaggatgtgtaggagtctgtgggagggtttggggaggaggtgggagggtgtcctgggcatggggaaaagtccagagccatcgaaccaggagagggtttcaggaattgcagcagttccctcaggctggagcagaagttccaaaggatggagtggtgagggtggtgagggcttcagagggctgtctgtatgggaccttggaggtcacccaaaggaatgtgtgctttatcctgagagcagagggagccttggaaaagatggaaaactccaatcaattaggtgtttggaaatgagacttaggctgcagggagagggtgtataggaacaaagaacagggagcatgcagcagcaggggctgggctgaagagggctgcccaccagcacagcaggggcaggggggctggaaggaaagggtctctttttttttagggccacacctgcggcatatggaggttcccaggctaggggtcgacttggagctgtagccactagtctacaccacagccatagcaatgccagatccttaaccccctgagcaaggccagggatcgaactcatgtcctcatggatgttaattgggtttgttaactgctgagccatgacaggaactcctaaagggacactttggagagctggtaaaggggtgggattgactgaactagattagactggaggggaatgtttgttatgcagcataactgcagccaaagctaacagaggggccacatgagcaaatatatagagacagaaaggccactgccatgcttgaagaagcggaacgatggtgctgatggtaccaaagagcaggctgtgtgatgggcattagtttggagagagaaagataggtggggacctgcacgagggagtttctaacaaatatatgaagttgattggattgttgttcccaagtatctattctgggccaataggcagagcttatcgcagtcccattgactttagactcagtcacatgaccagctttgaccaatggaatatggatagaagtgaccatgtgccaattcagagatttaattttttttttttttttttttgtcttttgtcttttgttgttgttgttgttgctatttcttgggctgctcccgcggcatatggaggttcccaggctaggggttgaatcggagctgtagccaccggcctacgccagacccacagcaacgcgggatccgagccgcgtctgcaacctacatacaccacagctcacggcaacgctggatcgttaacccactgagcaagggcagggaccgaacccgcaacctcatggttcctagtcagattcgttaaccactgcgccacgacgggaattccttattttttttatttttttgtctttttgtctttttagggtctcacccacggcatatggaggttcccaggctaggggtccaatcagaactgcagccgccagcctatactagaggcacagtggatccaagctgcatctgtgacactggatcgtcaacccactgagcaaggccagggatcgaacctgcaaactcatagttcctgatcagactcgtttccactgtgccacaacaggaactccctcagagattttatgttatttatttatttatttatttggtcatgtagcagtttgatgtgggatctcagttgccagaacagggattgaacctgggctgcatcagtgaaagcaccccaagtcccaaccactagactaccagggaactctcagaaactttaagaagcattgaattatctctttcttcctccagctctcagcatcaaaatgacacattctaggtagaaggagcagcttcagcctgggtcctgggaggagaagatacatgctgcagatattctatcctgctgccacctggagcagatctacaaaaccatgcagttgcaactgccttctggctgacaagcagtgtgagcaataaataaacctttgtggtcgtaaactaagatgggggggatgtttgttatgcagcataagctaactgatacacactatatatgtgagatgataaggatgcagatggtgaagaacatcacatgtcacgattagttgttgtacacatggtgagtcaacaaagaattttgtaattgatgaaccttctccacctttcctttaaagccaaccctctccactcccttctgctcctcctagccccttgctctatcagccaccccttccctcgcatggactgaatccttcccctgaaactatatctcacttgtctcttccatcctaaaatccttttctttactctgtcttcctccaactctagctcagtctcttcctcgaccatctcaaacaaacttcttcttcttcttttttttttttttttgtctttttagggccacacttatggcatatagaggttcccagtgtgtgacctacaccacagctcatggcaacgccggatgcttaagccactgagcaagaccagggatccaacccatgtcctcatggatgctagttgggtttgttaaccactgagccacaatgggaacttcttcaaacaaacttcttaaacgagttgattctcctcattatctccacttctttctccctcacctccaagcaatctagtttaccttccctccaccccaccaaaaccattcccagtatatttcagcaatctaatagtccagtgcaatccagtccttatcttcctagactgttccacatcatttagcttggaactaaattcattttctccctgcccaacctcaaatattcttctttccatggagttcctgtcatggcttggtggtaacaaacacgactagtattcttaaggactccggttccatccctggcctcgatcagtgggttaaggatccggcattgctgtgagctgtggtgtaggttacagactcggctcagatccctcgttgctgtggctctggtgtaggctggcagctgcagctccagtaagacccccagcctgggaacgtccatatgccacagttgcggccctaaaaagaaaaagaaaaaaaaaattcctctttccatattctctcagctagtggcaccatcattcatccagtgactcatgacagaaagccagcatgacacagtgaattctgctctgtagttgtccagtctgcggtgcctttgagacatccaagaggagatgtcccaagggcagcagctaaacatgtgaattgggggctgacaacagagatctgaagtggagataccgatgactgttagaggcagcatttaaagccatgtgcatgcgtcaacttgtctatttataaagtacaaggacctggtgatacatagagcgctctcctgagcctatacattccccctcctaagaccacaattccaggtaccacttagttccttccttcccaagtcacggctcacaggggcctccatatcaccaccttatttcatattctccccccccaacatgttgccttctccaacaactcttaaaattcataaaaacagaagatataagataccactacccaggcactaaaatgcctaaaaaacaaaacaaaacgcaccaatgtgctatcactcacatgtggaatcttttttttttttttggctttatttagggctgcacccaggcggcatatggaggaggttcccaggttaggggtctaatcagagctgcagctgccggcctacaccacggccacagcatcatcagatctgagccgcatctgtgacctaccccacagctcacggcaacgccagatccttaacccactgagcgaggccagggatcgaacccgcatcctcatggatcctagtcggattcctttccactgcgccatgacgggaacccccgcatgtggaatctttaaaaaaaaggacacaatgaacttctttacagaacagaaactgactcacagactttgaaaaactttcagtttccaagggagacaggttgggggtggcggggtgggtgagggtttgggatagagatactataaaattgggttgtgatgattgttgtacaaatataaatgtaataaaattcattgagttaaaaaaaaatgaacaggagttcccttcatggctcagtgattaacaaacacgactaggatctatgaggatgcaggttcaatccctggccttgctcagtgtattaaggatctggcgctgtggtgtaggtcgcacacagaactcggatcctgcgtggctgtggctgtggcgcaggctggcagctgtagctctgactggacccctagcctgggaacctctacatgccgtgggtgaggcaaaaaattaaaaaaaaaaaagaattaattataaaataaataaataaatgaacaaatgtagatgttaaacacttatcatggaacactcctggaaataaaagaagattagaactaaaaaaaaaaaatggacaatacgcaaacactgtcgaggatgtggaataatcgtgttttatacattgctggggaatctaaaacggtacaccctatgacccaacaatttcaatcctaggtgataacaaaggtccacaaaagacttctacaagaaataatagcccaacttagaaataacccaaaggttcatcgagacgagaataaatatgcaaatgatggtatagccttagaatagaatactactcagcactaaaaagaaagacacagatgaatttcacaacatacacaacaacacaggtgagcttcacaaactatatatatattacatggagggaaataagccagatacacaagagaaatacagtgtgattccatttatgtgaagtccaagagcaggcaaaattaatcaatgttgaataaagtgagaaaatggttgcttggaagaggcgaaggaaaattgataggaaatgggaactttcctaggatgacgcaaagatttcatatcttatttcgggtggccacttcaaaggtgcaaacaacagctaaaacttgtggaacccaaccctcaccacctgcgtattttattgtttggaaattatacttcagttaaaacattaggaaaagaaaataattttgtgaagtatcaataaaataacgaaaatgaagagactctaaagggcaaaaacacattcagttcaaatatataaattatatttgtgctatgtatgcatctatacgaatgtccagccccccttaatgtagccccctttcagccattctccgctcacccttgcccccatcctgatggcctctgtccatagccattttctagctgtcatcagaaatgatgcagtgaaagagcaaaagccttagagccagatagagctgcatttaaattccagctgctgagcacccataatcgagttactcggcctctctgaacgttcatttcctcaactacaaaatgggttgatgagacacaatcaaccctgttgggctggactaagagagaggcagtgtgctgattagtttctgggaaacctaattcttttgacctcagcctgtgaaaccaacttggttgtgcaaggcccactgccggcctggaaaagcccagaggatgagactcacgggctacttctccctgaaggatagggaggtggtcctgggaacccagagtctttgtgggctggtgctaagagtcgagtcgctaactcagagccatcagggccaggaaaacctatgacctatgacaaaggagacaagtttcctgccaagggttggccacctcaggatcttgcccaaatcactttgcacacccctagattccatttatccaccaaaaatggccagaggagcctggatctgaagaatttgatactaaaaacagcttctggaattcccatagtggctcagcagaaacgaatccgactaggaaccatgaggttgggggttcgacccctgacctcgctcagtgggctaaggatccagtgtggctgtgagctgtggtgtaggtcgcagatgcagtttggatctggcgttgctgtggctgtggtgtaggccagaggctacagctccgattagacccctagcctgggaacctccatatgcctcgtgtgtggccctaaaaagtcaagagttaaaaaaaaaaaaagagttaaaaacagctactatgtcttgggagcattgcgatgcaagtttgttctcagccaggcacagggttaagggtctggcattgccacagctgcggcttcggtggcaactacagctcggatctgatccctggcctgctccatgtgctgcggagtggtcaaaaaaaaaaaaaaaaaaaaaaaaaaaacccaaacaaatagcctctggtgtttcccaatctatagaagagatcaaggcaggaccaaactggttctgtccgaaagaaggaacggaagagtcagagtcggagccctgccggctagctcccctcctccaccttggcgtttcctgagccaggatcctaggtctcccaggggcaaagtttgaaatctccctgaccaggtaaaccctagggcctcttttagctcagtcttatccagtcgtggtgcatctgtcaagtgtaataataaagaggatctgcacctgcccccccaccccatctggtaggggaggcaaggtgcacccagaaataactccgagcaaggtacaaagtgcttagtgtagccaaagaagcacataagtccaataaagcatccacattccccccccaccacacacacacacacacaacctcttcgcacttggcatttccttacttccagcagtctctctatttcaggtttgtggaaacgggttctccctggaaaagggtttcccagctaggaggcggcccggccccgactccccctctcccccaccacccccggtccccgcacgtccagcgctccgagacccacccatttccaagcacaagaacaaggcgacaaggcccgctcaggggccaagaggagggcaaacgacgacaagcaaagccacaaaagcaaccgtccgggtctcttgtctttcctggggggaggagcggcgcccgcagacggtctccgcgcctccctccctcccgggccagcgggaagataggggaatctcaagtcgctctgctttctctcttcgcgcactgacattttcccccactttactgtttcttggacgcctttcaagagtttgtgcaaccagtctgtttagctgcttttctgccattttcaaacgcggggtggtgtccctttcgagtgggaacgtggtggcttaaagtctggaagggaccccttcgcctcccgtcaccccgctgcagcgggcctcttcgccgccaaagtttcggcgttccaaagtttcccccggccgggtttcgggctcggtcctccgctctctgagctccccgacttctccctctctgtgcgctcaggggtttctgtgcccctcacttcactctcaggttccctcttgcggaggcatcctcttcccacctagtcccgggcgagggaggcctccgcctcccctgccccacattgggagacagacccctccctcctttcgagacttcccgggcagtcctcctcctctgcgcgccccgagcctcccctctcccgcctccatccggcggaccccgtggaagcccgcagcccctcaggcccgacaagatggggacagagacggggtcagagttgagcacagaggtaacgacgagaacaaaagcggggacacggcagggcagcaacagggcagggccggcgcggtggcctgtcctctccccgcgctgcctccacggcgcccgcagccccgggccgggcgggactcgcggcctccaggggctcgggcagcgcccagcgggacccacctgatcggcagaagctgggtgcgctcggggatggcccacacctcggctcccggccccccggcggcgtcctcggctgagggaacagtggcgcgcggcgtgctcctgagctcggcagggcgtgccggggcggggtgtgccgcctgcgctccggcccgccggccgctgtgtgctcctccggggtggcgggcaggggcgcgaggaagccggcgggcactgggcggcgggcggcgagctccccgctccacccggcccgcggctgtttgtgcagagcgggtcccgccccagacacggccgctaggaggccgagggcgcgagtgcgcgagtgccggtgcgcgtgtgtgtctggtggccgggaggcgcagggggtgtttgtttcattttcactcaggcagaaaaaagcctgaaaccagcaaaaaaagaaaagaaattccctggtgagggtggctgggcctctttgccttctccggcctgcacgtggtgggggtggagggacccggagggtggggtggggtctatcacccagtactgcagggaggggccccggag

SEQ ID NO: 12 - DNA, 1116 bp, Sus scrofa
atgaatgtcaaaggaagagtggttctgtcaatgctgcttgtctcaactgtaatggttgtgttttgggaatacatcaacagcccagaaggttctttgttctggatataccagtcaaaaaacccagaagttggcagcagtgctcagaggggctggtggtttccgagctggtttaacaatgggactcacagttaccacgaagaagaagacgctataggcaacgaaaaggaacaaagaaaagaagacaacagaggagagcttccgctagtggactggtttaatcctgagaaacgcccagaggtcgtgaccataaccagatggaaggctccagtggtatgggaaggcacttacaacagagccgtcttagataattattatgccaaacagaaaattaccgtgggcttgacggtttttgctgtcggaagatacattgagcattacttggaggagttcttaatatctgcaaatacatacttcatggttggccacaaagtcatcttttacatcatggtggatgatatctccaggatgcctttgatagagctgggtcctctgcgttcctttaaagtgtttgagatcaagtccgagaagaggtggcaagacatcagcatgatgcgcatgaagaccatcggggagcacatcctggcccacatccagcacgaggtggacttcctcttctgcatggacgtggatcaggtcttccaaaacaactttggggtggagaccctgggccagtcggtggctcagctacaggcctggtggtacaaggcacatcctgacgagttcacctacgagaggcggaaggagtccgcagcctacattccgtttggccagggggatttttattaccacgcagccatttttgggggaacacccactcaggttctaaacatcactcaggagtgcttcaagggaatcctccaggacaaggaaaatgacatagaagccgagtggcatgatgaaagccatctaaacaagtatttccttctcaacaaacccactaaaatcttatccccagaatactgctgggattatcatataggcatgtctgtggatattaggattgtcaagatagcttggcagaaaaaagagtataatttggttagaaataacatctga

SEQ ID NO: 13 - protein, 371 aa, Sus scrofa
MNVKGRVVLSMLLVSTVMVVFWEYINSPEGSLFWIYQSKNPEVGSSAQRGWWFPSWFNNGTHSYHEEEDAIGNEKEQRKEDNRGELPLVDWFNPEKRPEVVTITRWKAPVVWEGTYNRAVLDNYYAKQKITVGLTVFAVGRYIEHYLEEFLISANTYFMVGHKVIFYIMVDDISRMPLIELGPLRSFKVFEIKSEKRWQDISMMRMKTIGEHILAHIQHEVDFLFCMDVDQVFQNNFGVETLGQSVAQLQAWWYKAHPDEFTYERRKESAAYIPFGQGDFYYHAAIFGGTPTQVLNITQECFKGILQDKENDIEAEWHDESHLNKYFLLNKPTKILSPEYCWDYHIGMSVDIRIVKIAWQKKEYNLVRNNI

SEQ ID NO: 14 - DNA, 38453 bp, Sus scrofa
ctacccagagcacatcaggaaggacttccagtcaggtggtgtgagggggagttttatttgaaaatgattccaaaacctgtaagagataaagtagaaaaacatgttttggaaacttccatgcctgctgtatttgccaaaatctgttcagtacctggtactcagctttccctgaaagatagcgtttctgtactgtttcagatgttcatttaacttagcatttttgatacagaatgcagtccttaaacatgacaattgtgtcttccttctatttttctgtgacatgccttgctttaaggaattcttgtatgtaaaaatatagaatctgtacacaaaaacattaggacctagtattggtgagagggcaagtaaatgggttatatgttatttctgagaaggcgagttggcttcctgaagatcagtctggcagagtatagattattctaagaaatcattatgaatttatcctaagaaatttatcctaagaaatcattatgaaagtgtgcaagacacacctacatatttctttgccaaaacatcatttcaaataatgaaaagttagaaacttacagggtagatcaaagactgttcagtaatcatgcaggtgtacagacgtatgtatagtattatcccattttcattttttgaaaaagtgcttgtggtatatgtgcttgtaaacagaaaaagaaagatgaactagacaccaaagtacaaattgctctctggatggtgggatcatttgtggtttaactgttttttgaatttaaaagtttttttttttccaaattttctgcggtagatctgtgttatttttatgatcagaaaaatatttagtaaactaaatctcattttaaaagcaacaaagatatattgggctatgactgcttcccaagattcatcacaggatcctttcacatttatgaactttgctatcaaaacagtatatagaaaaatagtcttcagaatcaatagcccagaagtttccaagatgtaattttttttaaaagaaaagttatctttgaatctttctcactcaaatttgctccatttccttttttccagaacagaagtcagctacgaactctgttgaaaatgaacaaaatgttttcattttgctttacaaatgaaatggtttccaaatggaatgttttacagacattaaaatagttgaggttggagttcccatcatgactcagtggttaatgaacatgactaggatccatgaggatgtgtgttcgatccctggcctcgttcagtggttaaggatccggtgttgccatgagctgtgcttgtaggtcacagacacggcttggatctgacgttgctatggctatgacgtaggctggtggctacagctctgattagactcctagcttgggaacgtccatatgctgcaggtgtggccctagaaagacaaaaagacaaaaaaaaaaacccaaaaactgaggttgacctgtgtgtcccaacactagaaataccaaagatattaatgaataaaaaatgcaaattacagatgtaccaggattacattaaaaaaaaaaacaaaacaaaacccaggaatgataacctcccctcctcaactataagggatgttttattgagaaaaaatacatttcttgaaatgctgatatgctcaaaaataggcctggggtgatacaactatgctgttaccaagtgttaccctggagagtgggtggagaaaggcaggaaacagggttttgtgggaggtgtggggttatttcctttttattttatataattctacattctttaaatatttttaaagcaatttcaagatattcaaaaagaaatctataaagaagaaatgtcaagacaggcctgtgcgtgcaagctcatggcagaagcggggtaggaggcttgcctgcttcagactaaattcctgaccttttcagagggtcagtggtcatgaaagaatgcattctcccctcttgctgattattttgcaaatacaaaaatggcaaatggggctttccagcatttcagcacaaatattccaactaaagccctaaggacctatacggttttgctatgagaaacttacgtggtttttgaagctcaaccagggagaaacttggaggatcatccccttaaccaactagttcaccaaattcatgctcagagttgggcaacatgggagatgaatgtcttccaggatcacaactttgccatatcaccccatcctcattcttgtcatagtgattcttagtaattttgcagtgtcttcagataaattctgaggagtggagctgctggatccaaacacaccctctccctttcataatgtccttcccttccctgtactctaaactacttgtatacaggattgaagcacatgggcatgaatgtccaaatggtgactctttgaaagttatcttcctaaccagatttgcctttcaaggttaacaaagaaaaaagctctaacggtggaatctccatggccatcaacactgcagggcacagtcagtcactgactctgcttatatagccctggcctcctctgcagcagcctagggcacacacgacaggcattttcggacttacagatgatggtatatatcaggatcccgctgaagccgggtttggaatcctatgtacaagtcatcccagagcagaccattctttaccacgtgtctgatgacatcaacccggctccgaatctgaaacagaggaggaatcacgagttaggcgcaacccagccagtagagagtgtcagtatggacccctcgtgtcccggagagaagcagctgcctgtaagggcagggatggaggaatcaaggagaaaagcctactgaagcagatctcacaggccgagggggagaggggcccctgagtgcagcagaaatcgagggatggaaacaggaagtggatcaggagctgggggtgcagagtggcagagagtacagacagagttggatggctgggtatgaacccccaatatagctgtgtgaccttggcaaccattctgtgcctcaagttcctcatctatacagtggaggtaatagaacattcctcctggggctgttgtgaggattacctgagccagtgtacttaaaatactgaaaacaaggcctgccacagagcaagattaccttaattcggtggtcaaggcccttaccttcaaagaatcccaactcctgacacaggatctgttgaatagtcagaggtgcacagggttaggagacaagcagagatggttttgagtttcagcccagcacttactaatcatgtgaccttaaccttgctaagcctcggtctcctctgtgactgttgtgagaaaaaaaaaaagagataattcataaaaaaaaaaaaaaaaaagagcatgaagtagcatgaagggaagtcactctaagattggactggcttcaacattttatcggtacccatgttcatgtttaccaggagcttttcagtatctggcatcatattttttttttcctgagaagtattgtgctaatgccagtagaggaaactttatcataaatgacaggctattaaatgacatagaatgatcaggagtttggcattagggatttacttctttttcgttcaccattcctataaaacaattacatccactgtgatctgagatcgcaacacaggtcaaaggcactctcattttgccagtagagatttagaaacactgcacagtttgtcaggtcgaggactgcccagctcaggggcagtatcaagatctatttcctcacagtggagggaagatggcctttcttgacctttcaatatagaggagagcacgtggaagaactaggggatgttttgagcaacatttagggtgtaaactgggaagggcttggagactcattaggtttagggatggagaaggaaagattgaagattaagcccttgtttctagcttggctcactgctgggggtaggggaaaggcatggatgttgccaataatcaagatggaaaaggagaaagaacagttgtaagaggattttgaacacgctgaaagtgagataccaaaggacttagacatccagggaatgatatctctggggggattagctctacatctaaagctggacagtgttggagagaggtgggcaaaggccgggcaggacctatggatttttggagtctttagcagagaagtggtgccagcagatgtgttcacccagccacagatttaagaagaagagtgggttgagcacggaaccccgggaaaagaagagatttaggtggtggctggagaaagagatatcttggaaggatgcagaggaagaagagtcaggaagtaaaggagatgaggacttgtctctgggctgagaaaggacttctagttcaaaatgatggaccgctctcgtgcataacccatgcacatcttccagactcaactgaagtgttgacaaaacaactgtactgggctgaactgcctcagagaagaagaaatgaagtgagtcactgacggcagtagatttggactaactaatgtgaatctggaaagctggcaggtaagaggtgtctgaggaacagggcagaggctgcagaatcccagagagtctgtggggggacattcagatgcaggaggaggagaggtaggtatcctggacgacagcagggacacacagcacaaaacgatgccatgaaaccgtggaccccttccctatgcctcagcacggctctgggccaaatgcattcagacagtgcactgaagaaatgggatcaattttgtaggaaaagtgtttgaatgagaccagggagtgtacttgtgatgccccagagcaaggacctccccgtctcagtatttaggggtccctcagcccaatagctgaacgctcaactacacagcttaaactgatgaccccttgtccaaatacaacctagatcttagttcattgcctatagtccctttaaaaaaaaatgaattagctttccacatctataaatctgggtattacatatgaaaaatccagatttctgagttttctagaaaattcagaagtacagctggagctcagtaagggccactcccttcccatctggcatttcctggccacatgacacggtccccacccagctccacccaattatgagatctttctgtggtccgtttatgagcacttgaggatatgacccctgccttcaagtaaagcctgctggataaccactccaaacatatacagaaagccctacctcagcttgaaaaggtctttgttgttgttgttgtagatatagattaatcccttaattcttaaaagtcacctacagtggaagaaagatcagcctgggataagcaacactgcatgcaactagaagccaaaggagcaacgccttcgggtgtccatggaaagtaacagccacccagcatcatgggctcagccaagctatcgtgcaagaccaggcaggaaagtacctccagtttagctcacgtgcaaattttcttcctcagattcttaagcagaaggttccacaaaggaggaaagcgaagaaagtgaagccatggtggggtctggaagtgggtcaaggatgtctctgggtggcagattggcggcagacccagagaggagcccacccaaattggagcaggaggatggagaactccaggagccatgcgtctaaggaagatggagacttgtgtactagaaaatatatttatgagtttgaaaggcaattcacgtccctcctcaaaaagggaatatgagaaggctccaggtagcaagaaaagagctcttccaagtaccggcataacctctttaaacaaacctcaacaactagaaatctcacaaaattcctgggcaataaaagcactgagagtcaaagtaaggaccaccatgtacgtgacaggcatgatgctttgccccagggtgtatcaagtctgcaagagagctgtggcttactttatcctacagatgtattatcaaaagctatggaaaagtgacttactttcaatgaaacattttataggaactcgtggttttaaaaattccaaagattatggttaacagataatttagaagttttataaatttaaatttgaaagtaaaacagtggctaaatacacagactctggagatagactgcgtgtggtcaaacccctgcaccatgatttacttgctataagacctcgggaaagttatttaatctcttggttaaatatggcattttccttatctgtaaatgggaagtacagtaatatctgttcataaggtggctgctgtattaaatgacttaatatttatgaagctgagcttggcaagagcaagttatcatgtatttggtgaacaaaccaagacatttatgattcttttttttttttctttttatttttaacagccgaatctgtggcatattctgggctgtggaagtttctgggctaggagatgaatcggagctgcagtttgtggcaacaccagatccttaacccatcgagtgaggccagggatcaaactcacattctcatagagacaatgtcaggtccttaaccagttgaggcacaacaggaactccttatcagatgcattttgctctaaatgagtgtttcacacagggtgttcctgtgtgtgaaaacccagggattttttttaactcagaaagctggcagtggattattggtttcactgaacttttggcataggcttttcttcaacagcaagtgctaacataccaatgattaaaatgtagtttaggaacacatctattataggaagctacatttacacctctacaattaagtcgccacacattcatgtgacacatgtaatatgcttaaaggtggactatatatcctcctaatttatttagtgattcatttatatagaattaaaaattacaatgtatgctcacatatatcatgtcatttgactgtcataaaaaaaactgataaggtggcaagaagctcaatagaatggaaaaaaacaacctttggacagggattcaaagcctcattattggttatctgaatcagtcggggtgaggcacccttcttggtcttgaccttgtgtccaaagccctagttcttaacatcatgcctctctgccgtaggtgagggatttgctcaaaattggagctcaacaaaatatgtgttggtttatgttgacttaactccctttccagagccacactgggtttgtttggggaaggagacaccactggagagaaggcaaggagggcagagatcagtgcttgcaggtctgagaacagcataagcaggccagctgtttggaaggaagcaggtcaagaagccagtctttgcaaatgactcaaaaagaagcaagtacggagttaatagtaatgtttcagtatcagagtattggttgtaacaaatgtaccccagtaaagtaagatattaacaataatttggagttcccattgtggcaaagcggaaacgaatccaactaggaaccacgaggatgcaggttcaatccctggccttgctcagtgggttaagaatccagctgtgagctttggtgtaggtcacagacgtggcccagatcctgcattgctgtggctatggcacagactggcagctgtagctccagttcaacccctagactgggaacctccatatgccacaggtgtggtcataaaaagcaaaaaaaaatttatatatatatataaacactactgtctgtaatatccttgcaacttttctgtaactctaaagttgttccaaaataaaaaagtttatttaggaaggaaggaagaaaggggcacttccactggtattcctgcttacttcctcatatggatgttcccggcttggtctttcttttggaaaggataaatccagaaagtcaaccaaatagtcatatcctccaggcaaagggctgaagtcctcatctgtctcaatcatctgttcaaatgacaacatggtaaagggaagaagcatatcaatctggcggtcaaggtccttagaaaattctagaatgtgcaagacccaagtgcccttaaatgatagcaatgaagcagaattaatacaaaaactgtctctcctctttgctctctcccactgccccatccctctacccatccctctccctccctccctctcttctttcttgaactgaattcaaatcctagccttctacactagcaaaaccacttcataacactaacttaaataaaatttatagagaaaattatcattatcttagtaatgagatatcaaattggctaaaaaataataaaatgtggactgtttctcatcatcacatagtagctaaatataaaagagtatcattaggagttcccgtcgtggcgcagtggttaacgaatccgactaggaaccatgaggttgcgggttcggtccctgcccttgctcagtgggttaacgatccggcattgccgtgagctgtggtgtaggctgcagatgcggcttggatcccgtgttgctgtggctctggcgtgggccggtggctaaagctccgattcgacccctggcctgggaacctccatatgctgcagaagcggcccaaagaaatagcaaaaagaccaaaaaacaaaaaaaattcttccacctactatccttttattttatgaaaggaaagatgttttcacacctcaaaaatagaaaggacctaatcttggaataatgacaattcgtccaaaggaaagagagttgacatcttggtgaccatactcagatgtgtgctcatacttatttcgttactgaccagcaaaaactttgtcacagactgtcactgacccccaggttgaattttaggattcattgattttgaggatggcaagtgttgcctggtacccagtactaatgttcaggggttgaaatttaaacttggaaatagtctttaccctggaggtaactgatctttgttcctaagggtatgaatactgtgcatttcccgatgctttccctaaactttgctctccaggcacacattcaggcactaaatataagtaggataaaatataagtatggcagggattcccagaccattttaggcctcctctttctcttgcatcccgctgcctgttgctacttattttgcttttgtggacatcctcagtttcagtgaccagcttataagctgaaccacttagctggtgagctctgtgtgtctatgtcagggctaacttaagttctagatctaggcttacttcccagttggtgcaattcagtccttacccagctgcagtccttaccttacctgcttccaggctgctacaggacaccagctctgcagtggagccacctgtctgtcccacaatttatttattttttatttttttatttttttgcctcttaaggccacacctgcagcatatggatgttcccaggctaggggttgaatcggagcttcagctgccagcctacgccacagccacagcaatgcaggatctgggctgcatctgcgacctacatcacagctgacagcaacgctggattcttaacccactgagcaaggccagggatcgaacctacatcctcatggatcctagctgggtttgttaactgctgagccatgaagggaactccccgtttcacagtttattttacttatttatttatttatttatttattttgtctttttgctatttctttgggccgctcctgcggcatatggaggttcccaggctaggggtctaatcggagctgtagccgctggcctacgctagagccacagcaacgcgggatccgagccgcgtctgcaacctacaccacagctcacggcaacgccggatcgttaacccactgagcaagggcagggaccgaacccgcaacctcatggttcctagtcggattcgttaaccactgcgccacgacgggaactcccccgtttcacagtttaaatagctgtcactgccataaccaacacaacacaatacaacacccacaaaaacccaaaacaaacaagaaccaagacacggtgatggaggaaaaagaatcctccaaaagaaaaacagagctggatctacatttcattccctacattttcaacattccctacattttcaacaaaggattgtttcagcacatagtccaatacgccctccgtctgacagtcagtaaggctcaatgaatgcttattgagaaaccaactggaatactaagaggttttcatatagctctgtaatataagaaaacaaaaacaaataataacttcatagcataccctgaccaccaggttataatccttaaatccagcccaagtgaagtattcttttatccaggatgagtgacgaaatatttcatctcctatagcagcattcaagatattcaaatatgggccaaaatcccaggaatccttgtaaatcttagtcccttctggaggctctacgatgcccttgcttaaagacacaaaggggagagaacaatgaaaaaagaaagcaacaaataaggaaggcagaagtttgcacttctacatcaacagtcaactggatgagcagctctaaggctgctcagatagatgatgcccaggggtcccacagatgtgcctcagggaacattgaggagtagggccccaccccagcctaaaccaggtcagctcctgttaattgcttagtgtgatagctctccaagtcagaatacatttaaagacgaagtctggagttcccgttgtggctcagagggtgaagaacatgacatagtgttcataaggagacgggttccatccctggcctcattcagtgggttcagaatctggtgttacctcagctgcggtgtatgtcacagatgcagctcagatcccaccttgctgtggctgtggtgtagaccaggcagctgcaactcccattcaacccctggcctgggaacttccatatgccgcaggtctggccgcaaaaaagaaaaaaaaaaaaaagataaagatccatgtccggggaaaaaaaaagttggaataccacggatgtggaccctttgggctcaaataactaaattatgaaaatgttgaatataagtggtcttactgattttgtggacatccgcttattcctgccctgcccccacctccattagactacaagtatgatgaaagcagcaaccatgacagtacacagaaggggtcccataaatatttgttgtacataggaataactctagcctatctttgagctacacctagaattttgtgtctctcatatacagccctcttattatactaataataccacagctgatagacagatgggctgacaggagacccagtcagcagtatggacaagagtgtgctctgacatccctagagctgtccatccagtgtgaagatggatcactgcatgcaaggtggaatcttgagtcctggcaatagaataggacgtgatctggagaaaggaaatatgaggagggaaataggcatctgtgtagtaaagatttggcaggtaatggtaggtccctacattccacttctccaaacactgttggcccaaagccggagatgcactggttttggtgataaattatgtgtcagatcctaaaatgtctaacttctaaatgaatctcatatctgcttctctaaatccttgctccatctcagccagcagcctcacttatctcctcctggaaaaaagcacagtctcccagctggcccccctgactctaggagttcttccccaggacatggtttttctaaaacacaatgcagtaatattccttctttgctttatcgctttctcaagctctccttactcacaggcaagttccttgccctccaggcaaggtcttataaggactttctgaccctggtccaacacggcatccctgtctcatccttttcctttaccttcatttactgaaggggatgaatgacttcataagggaaggacctcttcacagctgtttcccctgtacttagcatgatgcccaaaggagctcaataaatcatttctggaagaatggcatacatctatgcacttattcaaagtaattgtactcactaagagcattgtaaatcaactatatttcaataaaaatattaaaaactcaaagtatctgcactcaccaaacctatgacattattttcaccccctttctccagcatatccctctgactggaacctcaatctcttaatcactctattggtaaccttctcctgacctctaagacatagctcaaatgcctaagattggaggttgagcattccctgtccacatctcctgttctctctagccctctccctacctcacaaggcagagctgagcactcagtctcccggaatctcttatactttgtcttactactgagaacctaacatcaactctcattacccagaatgctttggtgtgacacaatgatgcatatgcagattccagggctctgcttcagatctactgaatcagaatctcagggggtggagcccagggagctgcatttacccagtttccttgggttactctgacgctcactctagtttgcgaatttctaccataggatgcgtctggggaactagagagggataatggagagagttcagcaaatgccaggtgccagactcttgaattccccactaaaacgtgaaataattaaaatcttctctcaccttgaactagagaatgaaaactgcctttatcctagaggcactggagagatcctatggaattttaaacagggaagggaacgggaagagttttgcacttaaaaatcatttctttggcagcagtgcagagttggagctttcaaacttcttgcctaagatcccaggaagaatatattttacatcaggactctaggggtccatatgccaagagtatctgtgaaaccagagtttcctgaaataatacttacccttgttatatgtgctcaggcaacatactcagggttgttctatacaattttgttctacttctttttattttattttatttttgtcttttttttttttttttttttttttttttttttttagggctgcacttgcagcatatggaggctcccaggataggggtctaattggagctgatgctgcaggcctacgccagagccacagcaatgccggatcagagccacgtctgtgacttacaaaacagcccacagcaatgccggatccttaacccactgaacaaggccagggattgaacccgcaaccttatggttcctagtcggatttatttctgctgtgccacgacgggaacgcctatttcctttttctaaatgctagttgtgatgccattgatttcctaacccatcaatgaatcgtgaccagcagattgaaaaaggctggcatggaggatggatcagaggacagcggggctgggagcacagaggcaagtcaggggccactgccagaattctggttaaaaaaaaattgtgagaggctgaatcaaggccacagcagaagaggctggaggtgagtgatggatttttaagagatttgtgaaggagaattgaccagatttgagctgtgggaagttagtaaaagggtataatcagctgactgtgtcccagaccccagctttgcaaaggtaaggccaggagaagggtgtgcttttggtaaccgtgtgccctgatctccaacagagtcacagtccacttctaaataatggtgaggaatgatggttccatccggctcaagacaagtacttataaaaatacaggtctggaacatccacattaatgtttctgaactgtactcccagggcaccgttaattgttcaaatggactgtctggggattggcgaggaggtaatatttacactgataggaacactaactctcaggcttattgctttctacttgctgaagacaacttatttttgagctgtaataatggcccttcataaaaaaaactttctcactctttatcctgaagtaaggttctgagacaaggaaaacatttgagtaattatcttatttatttatttttttttcaaggccacacccacagcatatggaagttcccaggctaagggtctaatcagagctggagctgctggcctatgccacagccacagtaacgtgggatctgagccgtgtctgccacctacaccacagctcacggcaatgccagatccttaacccactgaggggggccaggaatcgaacccgcatcctcatcgatactagtcgggtttgttattgctgagccactacgggaactcctaattattttataggataagaaaattattatataggactgtgaaaaaactcagtctcccccccaccccagagttgaaagatacttatttaatagtttattttatacagtaagactcccactttaaagggtggtgtgtagatcttaatgcatgacaagctcaggatgctagtcaagaaaaacttaatattcctacaaacagggacctgccaagaggccataggtatgccctttattttctcataaacatgaaaaaattcagaaatcatttttgttccctgtaaatattcaagtcaaacctgtctgttgggtcctttagcatcctacccagatcaagagtggctccaggtcttggggtccaggttaccacctcagaattcttcttgataagattgttgagttcatttgggtcatttttgatgtttgtttccttaatatacctgacaaataagagcattcccatgtaaggcagtttattttcagatgacattcttatttgaacaatgacagaattattttttatttctttgcattcctacttcccaatccttcttttcttaccccaggaaaaataaagactatacttgagctaatgtccctgactagggaagagctgttagtcaaagaaggttgactctatacttcgttttttagtataagcatatagtgtttggaattgaagttagatgtacaagactattatacataattggtaatagcacactcttgtatttaattttttttattcatactctctgttttcaggctgcttgttaaaataagctccagacccctactaatcattctttctcatttcatgttgtttcacagctaaatcactcattcagcatatattaacttatgcgtaaacacgttatataaaatatccagccatacttgtctgctgggtgggattccacgaaatacccagcaaaggggcagtaaattctgggttgtaggtccttcaccagccgagccttgtagttcaggagtttcttcctttctgttttaatgaattgggctttccattcctctggaatgacagggtttggattagtcttctctgttcagaaatcacagaaaaacaaaagttctagtagattagaagtcttgcaagagataaaaattgacagttgagtgatgcagaagtagaacaaagctccttgtcattagtggctttattttgcaaagttggttactaggaaaatatcccaaactagtcaaagacattgaatcccctctttgtttacggcaattcatttggatccaactgaaaacacagggcagcatgcatagttgtaccctgggtgcatgcatattttaagggcactgtcgattaactctctactaacatgggcatggctttgttattttggtggaatataaaagtaaagtatgttcattacactctggagatgcacagtggtcaagagcatggatgttggagtcagtcaagatcaaaatgcagctccaccacttcaattctttaagtctgtttttctcctctgttgaatggaatcatgatgcctacctcacgtgttgttcatttgttcgtttgctcattctttcatttgatcgatatttattgagcacctactatgtgccagacgtagttctaggcactgagaatacagtggcgagcaagataaagcaggtccctgctctcatggagcattcattctagtgaaagaagcaaataatgaataagtaaataagttcatttcaaagagtgatgagctaggaagaaaataaaacagagccaccaaatagagagtggctggggtaaggatgaggacgggtgggatggaagggcatattagaagggtagttagtgaagatgacatctggaatcatagaccatagacacagacacagaagagaagttgctgaccacgtggtggtcaggggcaatagcactctaagcagtagaaatagcacatacaaagacccagggcatggagctacatggtgtactgagtctgaggaacgaaaaacaagccagtatggacttatgcttgtcaagcaatgggggtatgggcaataaaggaaattgagaaattaggcagggcccagagcatgtatggtaccatgtcaggtactccttctaccattactgttatgaaaatttgataaacacaaacaaggatacaggggaaaaaatgttacctataagctaggtgtaaccactatgaacatgttagtatattacagaccttttaaaatgtatgtgcatgtgcacatactcacacacatacacatactcacataagaactgaattatgctaccaccctttagtaggtatgttttgcctccctagtcacactgttaaccccataaggacagcaccttccctcatctctcacatggtgatgcattctgggaggcaatgaaatcagacttacagaaaaaaggaaggaactggacaggttttcttcttattgcaagtagggcatttttgacacattactaaacagagattacttactaaaaacattaatttattaagcagacatatattgaacacttacaatgatagtactgagcaaaggtatgaaaaaaatataccacttaaccatcctccccatcccagccccagaaccacccttagacacagagcagaagagcttctgccttggtccccacattttttctagctttgagatataactgacatctagtattacataactttaaggtgtacaacatggtgatttcatgacatgcatgtatggctaaatgatgaccacaataaagttagttaacaccgccatcacctcacataattaccatttctgtttgtgtgcacgtgtgtgtgtgtggtgtgtgtgtgtggtgtgtgtgtgtgtgtgtgtgtgtgtgtgtgtgtggttagaacatgtaagatctactctcagcaacttccaagtatatagtacaatatgctatctatagttgccatgctgtttattatacccctagaatttattcatcttgtaactggaagtttatactctttgaccactattttccctaccacccccccaacctctcgtaatcccacactttagaggggcttccttagcctcatccctcccccgtatgagctttccacgaggtcaagggtatgtatccccctcaggctgcccacactctgttctgaaccacatacaaagagcacttaagcctggattaccaatgtcagactctttctgatcagctctatgttctatgtcaggaatccatttgatccaaattattcttgatttttcctgagattctccctagtctccttagtgtttcatgctccatcagcatattctcagctggaaactttagtctatatttgtgacttgcaagtatgatttcccaataagattgcacacctcttgtgaggaagaaccatgtcctaattatctttgtattgattcacacagcatttagcaaagtgccatgccaactccttggcatcattttgatataaagaattaccagtaaattttccaccactgaaagtcattggaaagcctgaagctcctccagcaaaatcactcatcattaatgcaaccttcataggcagccttcctccattgggtctggtgcaatccactgtattgagtattttatgacctgtgggaaaacaaaatggcatcggactcaaggtgaaatcttgaacaccatagtttgaattctcaggccaacagtcttccatgtaagtctatataatctgcctcattcaattatcgaagaattgctcacatccaaggaaaagagagagtaagatttgaaaatttatactcttgagtgacacattttgaactttcaaggaaataaattcattctgtctgattcagtgggttctgaatgaggacacttagcctgattccactccaggatcataaacagactactttccttagcaaactatattcaaaggttaagctcaaaggatgcagaggaaagtaatcagatcaacacaactctctcaaccttttggaaattcttttcgatgattattggggtaaagtgtatgattccataacataataatattcaagatgaaagtaaaacatttattcaataatgtcagttttaaggaaattacaataggtgaaatataggatatttttatctgttgccttcaaaaaaaacctttgcacctgtcacggcatagagtacattactaattgattctctgtaagattatatgaatgacagtccattttcctaagacagagatagaatatactgtactctatggaaaatgaagagggaagaaacagatgaacataggatgatgttttggataactattattatcctttctaccaagagcaattttcattgctgatgagggtaagaaaatacctttgtattccacaataatgcaagtgtccatctcaggatgaacgccatccatcaagatcatgaatcgaagatttttgtctacctggaattcaacaataaaaccaacaacggtttacatctattttgcttttaattcaatatttgaagaaactgtcctctcttctggaaagaaatccccttttttcagaactggatttgttatccatcagagtcataccatggataattggagaggaagaccatcttatttcagctcaaatagagatttacacaggaccatgtacagaaaaagtaggccattgtttctttagtcttaaaatttctatctcgcctcaaatttatcccagaaaggataacccaaacatgtggaaagaacacagacctgctgccatattccaaatggcactacattgatattagtcaactggacgccactctgattcagattccaaaatacaggtctttccgtgttgccaacataaatgggaacatctggtcttctctcagcaagcttcttcagtgttgggtaactagggtcagaaagatatacaggttgaaaggtgaaaaaatagaataatctagtataagagagagtgtgatccttacaccaacacgttgaccgagaagcaaggaactgaaaaactagactctccccagagtccaaaagaagagctctttcctcaaggctgactataacagtgaggaggatttcctgggagagtcctctttattgttagaacatcccatataccacggcatgtatatcaaaccaggtgtgcaaattccgtcttccacactgatgctgctttgtgcaagggtagttctaacagaaagtacagagtggagaagttacgccaaagaggtttctggtttcatcttgattttccttttttttctcattcctcagtgcagctccctcccagtgagagaaaggtctcggccatatatctaagagaacggatgggtgcccaccctggggcagtttttcaaacttcgaaggttgatagccacacatggtatacagaatgaactccttgtccttaaagagagttagtcactaactaagcaagacaataaagtttagcacagaggaaaatgacatttacctcttgtagcaatcccaagtcagtacacaatgaaccatccaagcatttttgagtacttacataagttgccaactttcatttattagaatttattacataaaaggattatatactactgtgtgggtggcaaaacatgaacaataaacaaataaatggctctgtaggtatatttcaatcatagtgttacacactttcacatgttattgtatttgattctcaacaaaagaccctttcatcttttagtgtgcttttaataaatgaggaaacacactcagaaatatatgactaacaaatagtaaattggtattcaaattcaggctttctgatcctaaacttggtgcttcttctattgaaaggaaattctggagttcctgttctggctcagtgggttaaggacccgacgttgtctctataaggatgcaagttccatccctggcttcactcagtggatctggcgttgccctgagctgcagcataggttgcagatgcagctcggatctgctgttactacggctgtaatgtagggtggcagctgcagcttagattcaacccctagcctgggaactttcatatgttgcaggtgcaactgtaaaaaaaaaaaaaaaaaaaaaaaaaaaggcaattccaactctaatgaatgtgctatcaggtttaagaatcatatttgtacatagactataatgtctggtgatataggatatttactcataagaaaaatataaacaaaatcagcatatcagcacttattaaccatactaatattcaagttccaaaactatatttaatatgtagaatccagagggggaaaatcattaggttttcttctctaaaaacaagggattcaaaaaaaaatcaaggattctttgaacatgtctttaatctctgggttaacatctaaatcttccactttaaagggctttgggagttaggataaatgattctaacatggatgtattttaatttgtgatttttaaattattgacaattcttgctggtgtctattaataacactattataatactcatatatttacataataaaatcacatttctttgactaaagacagttttctaaagcatgctggccccctccccctttgtttttgtgaaccaataaggcattattcagtaaataaaggtcagacaagagcaatggagataaatgactctggtgtttattagttgagcaggtaagagtcaaaaaactcagggtcaattctgtcaaggaaataaactcaaaggagtgaaaactgcaaggcttggtaacttttcagccataagctatctgcaatacactacccaactaaagcattgtgatactacagttgagaagtggctttttaatgcctggcaactttgcccacacaagcccctgaaatcaaaatgaaattggttttcaggacagtggttgggaaatgaccagactgaatgccataaaaagttcttatcctcactaaaatgtagtatactcccatagaatatctcttgctaggacaatggcaatagcatcttgtgacaggcactataaagcaatcgcctccttatcttgacactgttctctctaagcaagctgtacaaattgactaccacacaacatagttattacacaatgcatgaactcagggctctcataatcctgaaattacaagtttggttccagaacctcctgtgggacaaagatatcatgtagtagacaagtagatttttaatcgtagcacaatactccagtgggtggtattcggtttttaagtgtgttacaggtaatttgttactaaagctgttaattacttaagtttttaaaccctttccttaaaaagcgagagaacacacctgtgccttcgagatctcatggactttcaatagaaaaatccaggggccagtcaaccaacaaacaatgtattttccctaaccatggacattactatcaaagtatatccttcatgtgaacttgtcatgtaaagtcacaggaaaaaaaaataaagttgaaattgcttcattttagaacaccatgggcactgctgggtattggcaacctggcagtagcaatacaaatttctcaataaggatgaacacataggaccctgtaatgaagccagggggttgggaataggagcattcacaaatatttgtaacagtccattcacaaatatttgtggtttttgtcaatgaaagttcctctttctccctcctatttgatcgcctggattcaggaagtttccgtttctatccttagtatcatatggctctggtttcactgaaggatgtggtggactcagggttcaaaagttgagagctcagtgttgtcgaaatgctacagatcaggagttggcaaaacacagcgacctgctgctgaatgctaggaagggcttttacctttttttaaagggttgaaagggaaatcaaaaggcaatcatgtttggtgacacaggaaactgtttgtgatattcacacgtcattgcctataaagctgaaggcaatcaggctccttaggaccgactatggctgcttttgtgctataatagtagagttaagtagttgcaatgccaaccatatgtcttgtaaaactccaaacagtttacactctggtcctttgtagaaaatgtgtgctgattcccaccataaatgttaaactaaaaaaggaagtcaactttgatgatccttaaactcagagttttaccaactagcctgagggtaggacgtgagagggtccagggttattaaccccatgctcctttccacaatagctcttctcacatcccaatggtataaaacaggaaggcactttaaaaaggaggctatgcatgttgctatggcagtggcgtaggcccggggctacagctctgattcgacccctagcctgggaacctccatatgccacaggttcagccctgaaaagacaaaaaaaaaaaaaaaaaaaaagtttttaaaaaaagaggctatgcaaatgcaagcatttatctgaattagttctctttttatcagcccaagcgaatctacctcagaatgagcagtgattacaaaaaaagctgaaaaccaacagtgcttttattgcagcattttcttcggagttgagggctcacccttccttacctcaggtggtctgagtgcatgtgactgatgtaaattaaatctgcgcggctcagcctctccagccaatcagatggaggctcgtgtagtaaccaccatcctcgcgcaaaagcaggaccgattaaccaaggatcgaacaccatcctcttgtctcccagcttgaggtccatgcaggcgtgagtaaggtacgtgatctgttggaagacagtgagattcagatgatcggatcattaccagccagaaaaaggaactgggctggttagcagacaagccacatgggggacctttgctcctaagcatgttcaatgacacaggactcaagaaagacacagcaggagcatttccgtagaacacaattcccagcacaggcattactttattagaacagaaatgctcatggtgggttttaggggtcaaaccagttgatttacccaactcaaatcacctccaaggtatttaattatgctctgtaccacagaatatcttttgttaccagtcttttagaacacaatttacaaggaaagggagttacagatgttatggcagacctctggggatttaaatggtagggtggctgtgaataggtataagaatgactggttccagtgggtggacacagtcatgcagcctggctgcactggcttctaaggctttctcacctaaattacttgcggactcactcaggatgtcaaggtcctttgagaagggtgaaaaacaatgacttagagacaggcagagactacaggattctaaatcaacgccttactcccttcccatagtctggcacgtccacaggaaaaatgaaaacaccaaggagcagagataaggtcacagaaatccaaatgtgaaaagccagcaaagaaggtagggagaggtcaagaaatcaaatgcaggtgattgtgcctcttctgggtaggttcccatttgtctcctcaaaaaagtaagagcccatttttacaagcttcccgaatactccagaaaaattaatttttggttgtttacctctcccaaactaccaaagtgttttctctggaggaaattctctctctctctctttttttttttttttttagggccatacctgcggcatatggaggttcccaggctaggggtccaatctgagctgtagccgccagcctacgccacagccacagcaatgccagattcttaacccactgagtgaggccagggctcgaacccctgtccccatggatactagttgggttcgttaaccactgagcaacaacaggaaccccgaaattttcttttaaaagtggaaaaatgcacagaaaagtttgtaaagatcttagggcaatgtgcagaaacatgtagctggccattttatctgacagtgatctggtagcaagggcagtttctgaacttcctcccatagctgtgcatgactctcctttgggacctctgctaaaagattttttttttaatctagatatatttccttgtaatccttgccaagttcctgaggttcctaaataatgtgctcaagaatttagaatagggagttccctggtggtctagtggctaggacttggtgctttcaccactgcggctcaggttcagtgcctggtctgggagctgagatccacatcaagccactgctcaccatggaaaaagaaaaaaaaaaagacttcagaataactttattatatgtcctaactagccacttccaagaatactcaaggtaatataagatgtaaaaaaaaaaaaaaaaatatatatatatatatatataaattgatatgttagctttatttgtgtttttaagaatattataatttaacatttccttacctgcacttccccaaaagccaaatcttcaggagatctgggttctgaatcccacgggttaggaggatttagttctagaagcaaaactccattttcttcatccttttctacaactagaagcaaaggtggacaaatctggataatcaaccaaaaaaatgacttttaaaaagcatcgctaagacagaaatgcatggctcaagtacatggagtagacaaatcaaagcaaaatcaaaataaaaggcaacgctcatttgggtcaagcaacatctgcagagatgagggctgaagaccaatactgttcatctcgctattcacattccacgtaaggaactcatgagatcgcagatgtgtcagagacacaggcacaccaccaccaacttcattacaatcaaatgaatgattgatagagatgagttcaaggtgctgtggaagtgtctcggaaggaaaaccttgtttggttgtaagagtcaaagctgatttcaaataggaggtaatcctccagctgaacttgaaagacaaagtatttgggggctgacaaaagagatgtgatgatgggatatctcttttggataaaagataaaaggacaacataaaagataaaagaacagcatgtgcaaaggcatggaggcatgggagagctggatgttcacaaatgactggaattttatgaccaaggagaatggtgtctgaaccaggtgggagagacaggtaggtcagagtgggtcatgaaggaccctagattcccaactaaggaggcgtctggatttcatcctgtggcaatgaggggtcaatgaagaattttaagcaattgtggcaggcatgctggtggcttgcgcaaaacctattctctccttctcccttactattagcatcctaattgtgtgatggtacacctatttaaagatttcccagccccctggcagttatgagtggctatgtagacctagcactatgtgcagtttacatagttctggcgggtgagacgtaagcagacgtctacttcagaagtctcacgggacttgcaggaacacatttatttccccgacaaagagggacaactcaagagaccagcactgtctccccttcatcccttcatatttccccctcttgtgtggaatttgactgccatgcttggaggagcacaagccatcttgagatgctgaagaatagagccagacactgaggatagaacaggaggtgatagggaatttggctccttgataaacacagaacaaccataatgcccaggattacctgcttgggatctaagaaaaacaacctcctatatgattgagcaacttttgcctggtttttctattgcactggctgaaagcaatacctaagtgctatagcaagggagaattaaaatcagaacttaattttagaaagacccgctgtgaggcacatggagaggatcaattggagggaggcaagaccatgtttgagagtcctctctgttgttctggaaggctatcagcaaaccactaatggacatgtgcttgggagacagatggcctgtttctagccctcactctcccacttaatagcttattagctagaggaccttgagcaacttatttgacttctccagtgtttttatctctaaccctggctatctccacacacagttaatcctattactgccagcaattttattcattactaaatgaaagcagatgaggtcccaagccaaagcaaaccttgtggaaatggcattgccgccctgccctcaaagacgagcactttcctactttattcaaaggacattaaaaaatgttttgtgggagttcccactgtagtgcagtgggttaagaatccaactgcaatggctcgggtagctgtggaaatgcaggtttgatccctagccgggcacagtgggttaaaggatccagcattgccacagctgcagtgtagggcacagctgcaacttggagcctggattcaacccctggcccagaaactttcatatgctgtgggcatggccctttaaaaaatgttttgcttacattttccaaatgaatattaattatactcactttaagacaactgctagtggaagaaactgaagtaaaaattacccgtaaaatgaaaaatggcacaaatgaaactttccccagaaaagaaaatcatggacatggagaacagacttgtggttgccaagagggaggaggagggagtgggatggactgggagtttggggttaatagagcaaactattgcatttagggagttcccatcgtggctcagtggttaatgaatccgactaggaaccatgaggttgccggtttgatctctggcctcactcagtgggttaaggatccggtgttgccgtgagctttggtgtaggttgcagatgaggcttggatcccgagttgctgtggctgtggtgtaggctggcagctgcagcttcaatttgacccctagcctgggaacctacctatgccaagggtgaggccccagaaaagacaaaaaaaaaaaaaaaaaagacaaaaaaaccccaaaacacatatacaatagatgcaaactattgcatttggaatggaaaagcaatgagaccctgctgaatagcagagggactatatctagtcacttgtgatggatgcatattatctgcatcctgggctgcaatttcctgatctgtcaaataggattatgatacatactttgcagagttgttgtagggattaagtgatataataaatcctaaagtgtcactatgcctagcacagagaaggcacgtaataaatgatagtattattatggcaattatttcaccctcaaggaataaagaattaaaaaggaggttcaagactgaacaaacaggagttactatcatggctcagtggttaacgaaactgactggaaactcaggttcgatccctggccccgctcagtgggttaaggatccggcattgccacgaactgtcatataagttggaccccgctttgctgcagttgttgtgtaggctggcagctgtagctccaatttgacctctagcctgggaacctccatatgctgtgggtgcagccttaaaaagacaagagacaaaaaaaaaaaaaaaaaaaaaaaaacccacaaagattcaagaaacaaaattatatgctagcacataaccagttcaaaaatacaaggaattgggaattcccattgtggctcagcagaaacgaatctgactagtgtccatgaggtccatgaggagacagattcgatctctggcattgctcagtgggttaacaatctggcattaccaagagctgtggttaagtcacagatgcagcttggatcccatgttgctgtggctgtggagtaggctggcagctgtagctccagttggacccctagcctggaacttccatatgccacaggtgcagccctaaaagcaaaacaaaacaaaacaaacaaacaaaaacccaaaaaaaccgaccaacaaacaacaacaaaaatcccaaggaattacaggagactttcagaaaactacatcgatatccatgcttaaggattttccttctttagaagtgttctttttcaagaaaagcaggaaaaactgagtctgcagttcttaactattatttcaaagccaataccataaaagtttttatgccccttgctcaaagataaattgcatttatgcactgaagaaaatcatgacatctgccaactgcctgcatctttatagaatgtggtatccttactttgaccacataaactaatgacatctaagttatttggattatgacttaatatttaaccagaagaacaaacaaatggaattcattaaaatttttaatagggaggaataatgaagaggaattataataaaaacatattagaaaactataataattaaatcatagataattggcataaggacgaagagaggatcctaattaaataacagtttaatatagtctaagagaaggaccataaattagtggaagaggaagggctgcctgatacacagtgctgtgcaatggttagttaagtattccaggtgcttaaagacacaaagaaaagcaaccaagtgcttaaaaagtatgaaaaaaatggcatatcacaggggggacttctaagtttaatagcaatggaaataattccaatggaaaatcttagtagatagaaaagtaaaatgaaaaatttctaccacctaagaaaatgggcaaacacacttggaatatataagcatcgtatttgaaaaacaagtataatttaaaacaatgatgctatttttggttcaaatgaggaacgtttgaaaaactagaatgccctgagctgataaggaatgaggagaaaaggcaggctgattaagtagttaatgggaacaaaaattggttgggttctaaaaaaatggattataatgcaatacacattaaagaatgggtaaatgaatagtggactcattcattcatttaggacctcaagttaagaggattatgttaaccatatttctcagttcatgacacattatattcagtccaggcagagctacttacttactccctttatctttgttttctactcttctttactctcctcccctgtaggcaaccatttgaaagttcatgcaaaatatttactacattgtatgtgtgcatctttaatttttataaatggtattgggtttccaggctgtttcttactctttttcattcaaatctatgtttctaagatacattcatgttgccatgtggacatctcatctctaactggagtttcacataccctggtgccacattttattgattcatgctcccaggggtggacccatagattctgccacaacaggatttctttggtacataaacaggcgtgggattgatgggccacagtgtattcataaacctgctctgcctaaccactgtcagattactttcccacatgactgcaccggccatactcccaccacaggcatgacgatttttatatcctttatccctgacatttgatatcacctttgtttctaactttttatcagtcaaaaagatgtaaagtaaagcacctcattgcttcagtctgtagttttctaataattaataggtttgagcatattttcatgtgcttattgacttttggagatttttcttttgtaaaatgctagttcatatcctttcttaatttttgtattttcttaatttttatattgggtttcctatctttttcttgtcgatttgcattacttcctcctataagctggataatattccctcattggttgtaaatattgcaaaataatcactcaaactatcatatgttctttaactttgtccatggggtcttccagttcatagaaatctgtagtgtatcgatgatatcttattcactaggtttgtgtatatgtgtgtttcttttttctttcttttttccctttgggctgtacttttgaagtattgtttgaaaagtcaagaagtatcagtaatctctaggtcacaaaaatagtctacatttcttccattactttcatagtcttaccttcctcatttgagctatcagtccatgtgaagcccatctttatgttaaagtatgaggtgttaaaaaaaatgggcgggagttcccgtcgtggcacagtggttaacaaatccgactaggaaccatgaggttgcgggttcgatccctggccttgctcagtgggttaacgatccggcgttgccctgagctgtggtgtaggttgcagacacggctcggatccagcgttgctgtggctctggcgtaggccggtggctacagctccaattcgacccctagcctgggaacctccatatgctgtgagagcggcccaagaaaatggcaaaaagccaaaaaaaaaaaaaaaaaaaaaaatgggcgaaagcatgagttagtcatatccttttgccagtaattcatttgtctcacagaaacaactccaaacacaaagcagctcttacgcacaatgatcacagtttcgttttgatggaaaaaaaaaattatgaacagtctaaatttcaacaacagaaaaatggctaaataaatcatgtaagttaatatttaatgtaaacatactttataattgtgtatatatggaatctgacctaacatgactactataataattttaacaagacaaaaaacaggataaaaaaagtaatatataaaataattacaattgactggaacaactagatagaagatgaacaaggaaatagaagactcgaacagcactataaactaactagacctaacagacaaaaaaagcacattccaccagcagcagaatacacattcttctcaagtacatttggaatattctccagcataaactatgttatataaacgtttcaataaattttaaaagatcagtcatacaaagtatgttctctgaccacaatgaaatgaaattagatactaataagagaagaaagttggaaaattcacaaatatgtggaaattaaacaacatacttctaaatacaaacagtttaggaaagaaatcacaacagaaattacaaaatgctttgatacaaatacaaataaaaacataacatgctgaaacatagaatgcagctaaaacaatgcagtgcatagaaggaaatttatatctgtacacacctataataaaaagaaagatctcaaataaaaaaactaaacttccaccttaagaaattagaaaaagaagatcaaactaaacacaaagcaaacagaaggaaggaaataagaaaaaaaattagagctaaatggaatttagaccgggaaaacaagagaaaatcaatgaagataaatgtttgttttttgagggagttctcgtcatggtgcttcagaaatgaatccgactaggaacctgaggttgcaggtgtgatccctggccgagctgtggtgtaggtcacagatgcagcttggatctggcattgctatggttgtggtataggccagcagctgtagctccgattagacctctagcctgagaacttccatatgcctcaggtgcagccttaaaaagcaaaaaaaaaaaccaaaaaacaaacaaaacaaaaaagttagttatttgaaaagattaatacaattacaaacctttagctaaactgaccaagaaaaaagagaaaagacccaaattactacagccaggaattaaaagggggatattactatcaatctaaataatccaaatgaaatggagaaagtcctaggaagaaacaaatgaacaaaactgactcaagaagaactagaacgtctgaggagcagacccataacaaattaaagagatttaattagtaatcaaaaaacttttcacaaagattagccatggcccagatggcttcactggtgaatctgaccaaatgtttaaagaagaatcaataccaatatacttcacaaactcttccaataaatagaaaaggagggaacacttctcaattcattctatgagagcagtaattattactctgatccccaaaccagacaaagatatcacacaaagagaaaactacagaccaatattccttatgaatatggacatagaaatccttaattgaatattagcaaatataatttagcactataaaaaagaattatgaccatgagcaagtggggtttatgctagcttgattcaatataggaacatccatggagacagtaagtagattagtggttgccaggggctgagggaagaagggaatggactgctaatagttagaaggtttctttgggggatgatgtgaatgacctggaattatatagtgatagtaatagcacaacatgtgaaaatactaaaaaccattgagtcaaacactctaaaagggtaaattttatggtacctgaattgtattccaataaaaggagaaggaggaagaagaggaggcaggggagaggcggggaaggggaccaaggtgacaactggcagataccaaaacactgatggaaatgtaggtgagagtcttcttccttctactttcctaacatctaccttttttaatgatgaccatacaatgttatttatttaacaataaaaccaaataatctcagctcacatgggattgagccatccttttctttcttgggatgtggtatgaaatcactacagtattggtagcactgtactgaaaagtgggttctgttaacaaaattttctactctcacaacattaccttactggagcagaggctgaaaactgcagtgggtcttgttatttccagtcctccactgaccctactgacaactctggccctgcccttcacctgccgtggcagtgaacatcaacgctttgcatcatttcctggcctcagtctattttccagtttacccaactttctgctgggtgggaaatccctccttcctgctccacaggacccagtcacaaggcatatggcagactatttgagtcatacatatacaagcaaatcattactctgtactctgtcgtaacacgttctgaacatttaacagatgttctttcaacaacccagtaaaatcactactaccaatattatctcccattgaggaaactaaagaacagagactaacccacctaaagtcatttaattgcatgtttgagcatcaggatatgaacccacgctagtgagccccattcactcttaaccattttgctaaaaggtctcactataggtcttatccaaaagacttagctcccttaaggagctataagtttctgggttacatactcataaagtagatggtcaattgtcctctcacctacacaaacagtttaagacagtcaaacttttgcttcttatctctttttttttttaatcagatgaattaaatagtatttgtacagcacatgtaaccagttcctgctaacaatgtgatctgaagatttcctaggctaggtcaacagacaaagggtgggggctttctggcaaaagaaggaaatggttcaggcatccctttgaggggcaaggtgagaattagtcaatatttccaaaagtcatttaattgtgttagatcaaatctacttttttatttatataacagtcattctaaaacagtgtgtaaaagcagttttaagaatcttcccaagtaactttttatactgataaagacatttttaatcacttagaacagagacaaatttattcctatgattaagcccttcttactcatatttctataggctttcttgagtaggaagaaggaaaaagtagaagtggagccagcatgagaatcacacagaagctgtagcctctaacgtgtgccagaaagagtcatggaatttgaaggactttatttcccaactggaattgtgagtttcattataacgtctcattatatcatctcatttacgccgactctatcttatccatctttgtatttcttaatacctagtgcaatgtttacacatggtaaggtctcatcaaatacttactgaacaaatgaatgaatgaagggattttttagagaaaacttgcctagaattttcagtgatggttacttttaaaatacctcagtttaaaatcagaatgcatccaaggcttctaatgagattggaaacaagttgacaagagggaccccaatgacagtaacagcagaaaacattgatcagtattgatggtatttacccagttcgtcttgacagaagcttccaggaggattgatatacttcatgctgcttacatctaacttccagttgtgttttgtgcatttaacagacctggatggaaaattgtacttaggtttatgaaatggtgaaaataaatattaatctatttaaggcttaaatgcattattctgtgatcaaagtaaacgactgtagttggttgaacacaaaactcatgaaaggaaaaaaatagctaatattcaaatatccaaggaaatataaactcatcatcagtaggtgattttgaaagtgaagatattttttccttgtatttgatttttgtcagtttgatttgtatgtgactttgcacatttctccttgggtttatcctgtatgagactcttcgtgtttccctgacttgagtaaagtgaagataaacaccatggcacaaaataacgtgttagagatcagcagagccatcagaataaagtctgctttggagttccaactgtggctcagcaggttaggaacctgagcagtatccatgaggatgtgtgttcaatccctggcattgttcaatgggttaaggatccagcattgctgcaagctgcagtgtaggtcacagatgcagctcagatctggcattgctgtggctgtggcataggctggcagctgcagctctaatttgaccgctagcctaggaacttctatatgctatgggtgcagcccttaaaatttgtttttttttttaaagaataaagtcatctttaaggatgactctcatacaaaagctaagctgagtaagatccaagtggggccagtataaggaaataatgtagtaataaagattatctgtgatttaatagtcacactataacccttggcccctagtatagtgtactaaacctaagatcaactcaaattttcatttgtctaagaaaaaagacttcctgattgtttaaagatttctgatcatggttgccagataaaatacaggaaaaatataaatttcagataaataaaaaataattttaaaatgtcttacacaatattgaacatatattggaaatttgtttatctgtaattcaaatttaactactcagctttgcatttttatttgttaactctggcaacactgcttcagaatgagaatcagattaattgtagcaacaaaggaggcttagtaatattttttccatttcttaccagacggtgatagggatgtgatagttggagatagggcctaaaagttccatttcctctccatatttggtagtctgtctggctgtctttctttctttctttttgctttttagggctgcacctttctttttgctttttagggtggcatatgggggttcccaggagaggggttgaatcggagctgcagcaacaccatatccttaacccacttagcgaggccaggcatcaaacctgtgtcctcatggatactagttagattcatttctgctgtgtcccagtaggaactcccatattttggtagtgtttccagtcaagtttttttttaaacagttcaagattttttttttttttaacagacaaatatgtcttcaaccagaaatatcagattgtttaagctaacaatgtctattttcacttatatatcagtaaactatgctgattttttccaagcttcattacaatcaagaatttttaatgctcttttctagtaacaaggcagaaaacatattcaaacttcgacttatggaggatattttgtgacacttcctttctcatcaatgagtaactaacaactatcatggctcagaggttaacgaatctgactcgtatctatgaggacgagagtttgatccctggcctcgatcagtgggttaagaatccagtgttgccgtgagctctggtgtaggtcaaagattggctcgaattgtgcattgctgtggctgtggtgtaggccagcagctacagctcacattggatccctagcctgggaacctccatatgccatgggtgcggccctaaaaaaaaaaaaaaaaaaaaaaaaaaaaaaaaaaaaaaagatgaaataaataaattaacaaaaattgaaaacattccaaatgcagctattcagcaggctgggtcgttaaaggagaaatgtggcagtgtcacaactgctcatgggcagtaggcagaaaggagagagaggacagcttcatgtgccaagaggctgtgaaattagattgacaaaatgaggaccacagcttatgagagttcctgatcttgattatgtacaaagaagaaaaatggctgaggaagggaaggtggaacaggtaggtcactgcccttgactgtatcgtggaagagatatttcaggtgaattgctgcacagagagcctaagtagaagcagccaaatttggagagatggatgggggagtgtaccatgtaaactgctcttgggatggagtttcagcatataaatgcttggggagctgtatctgggagcaaagctgggtgaatctggctccccacctgcagcagagctaagatggtgccatctccatgttagcctgccaacagaataggttgaaactgggatcgttcaccccctaaggctttgggtgaaggagaggaagaccagtctgtggcaaagcaattaccatattaagctgagcaagccagattcaagaacagcctgaattcctgtaaagaacctctgttcctaagctacgcaagatcatggcagagtaataataatagcaaatgtaagtgacatttattgagcatgtatcatatgccagacattattttaagtgctttagtgtatgaaatcactccatcctctcagtagccagacagagaaggctttgtctactttcattttcactttatgaggaagaagagcgaggcccagaaaggctaagaaatgtgtccgaggtcacagagctgctaagtggtggagccaggcttctaaaccaagcagtttgcaaggaaagaccatgctcttaatcataaagctgcaacactcccttaaacaactggctaagacaacaccacaggacatggcccactaaggagaaaaaaggacagagaaaaagcagagtccccgggccacaagtcggaagacctcaaggcctgcacgtgcctgcagaagcttcttggtgacagaacaacctatggctgaggtctccctaacttgaaaccacccagaagatgcaagggactcaaaagcagtctgtcagcaaacaaccaagaggttcttccagagtaggctgcctaccaaaagtatgtcccatgcagtgcctgaaacatatctaactaaaaatatattcgttgtttatctgaaatgcaaatttgactgggcaccctctatttgcctaatctagcaaccctatctgcagagccaagcaagctacaggtatgacagcacttaacctgggagctgggccctgaagctaagtatgcagtgatgcaagtctgtgggccagtgtaagaagattccagacttgggtggtgatcttctatacagttagagcagggagttcttggacagctaccagttacctctgagtccattcgcactaaactgcccacagatgacctgagaaataagattgacgacacgacacggtggaagacaagcctaatatggaaacggctgaaacactacgagagtcaagttaggctgaagcaaagcttgaaagatggggtcaatccctcattcattatcagtggtgagcatcaggctgacaaaacacctccacccagaactccccctggctctgcaagctgtgctagctctttgtcaatcactgaaaagaaagcccaaccatcctatcctagaattgctcctgagatggggaggtaagcgatatgcaggtttaatcaaggggctggggaaaaggcgtaccagcactcgttcttccaagaaatgatcagaagagccgctgttgaggccaggtgcagctagagctctgccatttttcgggttttcatcagggaaagtctctctgttctagggcagtgtttggacaagcactcacctcacacacacacacttctgagagagcaggaaaggaaatccaaaagaggcttgagtctttgaatataaaagctggtaaacacacacacacacacacacacacacacacacacactccttagaagtttcactgtttatcaactaggaatacattttaaacaatagttcttcagagaggatgggaaattaagtcaaggtcataaatcaaaatcagagagctgccgtaaaggagcttaagaaaaagttaggcatgtgctgggggaaatagcatgttgattggatcatttaaaatttctcaatgagcacatttcctgccaaacctaattgggagaaaggatcgccagggagaaagcaaaggattctcagtaccttccatttagatcctcaatgtctttaatgaagaggcctccttggtgcttgcacatgttcttacatgccttcaggcggctcttattcttaaataagatgtaatccttgccagtgctcttatttcgaacaaaattgattccttccttgagattggcagcttcggcaggtgagaggcacaacaggatctccgtcgtttgttcgatg

SEQ ID NO: 15 - DNA, 1734 bp, Sus scrofa
atgagcagcatcgaacaaacgacggagatcctgttgtgcctctcacctgccgaagctgccaatctcaaggaaggaatcaattttgttcgaaataagagcactggcaaggactacatcttatttaagaataagagccgcctgaaggcatgtaagaacatgtgcaagcaccaaggaggcctcttcattaaagacattgaggatctaaatggaaggtctgttaaatgcacaaaacacaactggaagttagatgtaagcagcatgaagtatatcaatcctcctggaagcttctgtcaagacgaactggttgtagaaaaggatgaagaaaatggagttttgcttctagaactaaatcctcctaacccgtgggattcagaacccagatctcctgaagatttggcttttggggaagtgcagatcacgtaccttactcacgcctgcatggacctcaagctgggagacaagaggatggtgttcgatccttggttaatcggtcctgcttttgcgcgaggatggtggttactacacgagcctccatctgattggctggagaggctgagccttgcagatttaatttacatcagtcacatgcactcagaccacctgagttacccaacactgaagaagcttgctgagagaagaccagatgttcccatttatgttggcaacacggaaagacctgtattttggaatctgaatcagagtggcgtccagttgactaatatcaatgtagtgccatttggaatatggcagcaggtagacaaaaatcttcgattcatgatcttgatggatggcgttcatcctgagatggacacctgcattattgtggaatacaaaggtcataaaatactccatacagtggattgcaccagacccaatggaggaaggctgcctatgaaggttgcattaatgatgagtgattttgctggaggagcttcaggctttccaatgactttcagtggtggaaaatttactgaggaatggaaagcccaattcattaaaacagaaaggaagaaactcctgaactacaaggctcggctggtgaaggacctacaacccagaatttactgcccctttgctgggtatttcgtggaatcccacccagcagacaagtatattaaggaaacaaacatcaaaaatgacccaaatgaactcaacaatcttatcaagaagaattctgaggtggtaacctggaccccaagacctggagccactcttgatctgggtaggatgctaaaggacccaacagacagcaagggcatcgtagagcctccagaagggactaagatttacaaggattcctgggattttggcccatatttgaatatcttgaatgctgctataggagatgaaatatttcgtcactcatcctggataaaagaatacttcacttgggctggatttaaggattataacctggtggtcaggatgattgagacagatgaggacttcagccctttgcctggaggatatgactatttggttgactttctggatttatcctttccaaaagaaagaccaagtcgggaacatccatatgaggaaattcggagccgggttgatgtcatcagacacgtggtaaagaatggtctgctctgggatgacttgtacataggattccaaacccggcttcagcgggatcctgatatataccatcatctgttttggaatcattttcaaataaaactccccctcacaccacctgactggaagtccttcctgatgtgctctgggtag

SEQ ID NO: 16 - protein, 577 aa, Sus scrofa
MSSIEQTTEILLCLSPAEAANLKEGINFVRNKSTGKDYILFKNKSRLKACKNMCKHQGGLFIKDIEDLNGRSVKCTKHNWKLDVSSMKYINPPGSFCQDELVVEKDEENGVLLLELNPPNPWDSEPRSPEDLAFGEVQITYLTHACMDLKLGDKRMVFDPWLIGPAFARGWWLLHEPPSDWLERLSLADLIYISHMHSDHLSYPTLKKLAERRPDVPIYVGNTERPVFWNLNQSGVQLTNINVVPFGIWQQVDKNLRFMILMDGVHPEMDTCIIVEYKGHKILHTVDCTRPNGGRLPMKVALMMSDFAGGASGFPMTFSGGKFTEEWKAQFIKTERKKLLNYKARLVKDLQPRIYCPFAGYFVESHPADKYIKETNIKNDPNELNNLIKKNSEVVTWTPRPGATLDLGRMLKDPTDSKGIVEPPEGTKIYKDSWDFGPYLNILNAAIGDEIFRHSSWIKEYFTWAGFKDYNLVVRMIETDEDFSPLPGGYDYLVDFLDLSFPKERPSREHPYEEIRSRVDVIRHVVKNGLLWDDLYIGFQTRLQRDPDIYHHLFWNHFQIKLPLTPPDWKSFLMCSG

SEQ ID NO: 17 - DNA, 1328 bp, Sus scrofa
cttatagtaactttattaccttttttgtctgaacagttagtctttcttaatgtttctaggagagaacattagttttattttgaagagcacccactcagcgtatttgtcttacataacatgcagaacatgtatccacatttaaaaatttatctcattgtagtacatacttttacaaggtattccataaacactgaaaactataagaaacatatacatctaagaatcctactttatatagtctttcactaaataatactattttcatatacattttcaggtatttctagcttctcctgtgtatttagaattatgtatgtaatcaccaagagaatatgggccccttggaaggaaagcagtagaagcccacggagtaaagatctttctttaaaaagcaggttttattattgttttaaatacctcttggttatttgagattctaagaacttcgattaagtcccaaagtggaatgatcccttaataaccagacgataggaaaggtgaggaaagtgtcagtagcagggccaggacttggcacattcactaagaatgtagcacctcagtgtagcttatagtatagtgcctgggcagagttactgctcaacagctcgggatgatgaaccatctgctgccctgcaagtgtgggagcagctaacttggtgactgcaatccatggacagttagggcttgatgtatggtgtatgtagagagatgatggcagaggtagattctctccggcccatccttatcagtagtgccgtgattatgcttctctctgtgttcgaggagatcttttagacctgtaagaagagagggagagtgtgaaagactctggtttcagtctgagttctgcttggaacacactgaattcatagataatcccaagttctcaggtgaagtgtggtgagatttcctgctacacaatcattgtgtgttacaggggatcctttttaaaaaaggccaggaaaggcttgtgggaaatttggtatctttgcttggatagttataactctgcctcaaggttgaaatgacctattgacacttctagatagggaatcaggtgacttgatataccacataagatgacatctcagtatataagcacatgaaggtaatggcacagtggtggtaacactcttttaagccaaagattcccaggaaggcccaatgcaaatatttctaacttcccaaaattgacatttcttaaagagaaatacttctgcaagcagtagcaaacctacctttctttgctaattgctttcagtaaattcttgatggtcttagactctggattcagacatcttttctccccattctttttcattgtggca

SEQ ID NO: 18 - DNA, 1173 bp, Sus scrofa
acgcgggggagacactcttcaactgctcattctgagcctactgcagaagaatcttcagctgcagcaccatgaaccaaagtgctgttcttattttctgccttattcttctgactctgagtggaactcaaggaatacctctctccagaactgttcgctgtacctgcatcaagatcagtgacagacctgttaatccgaggtccttagaaaaacttgaaatgattcctgcaagtcaatcttgcccacatgttgagatcattgccacaatgaaaaagaatggggagaaaagatgtctgaatccagagtctaagaccatcaagaatttactgaaagcaattagcaaagaaaggtctaaaagatctcctcgaacacagagagaagcataatcacggcactactgataaggatgggccggagagaatctacctctgccatcatctctctacatacaccatacatcaagccctaactgtccatggattgcagtcaccaagttagctgctcccacacttgcagggcagcagatggttcatcatcccgagctgttgagcagtaactctgcccaggcactatactataagctacactgaggtgctacattcttagtgaatgtgccaagtcctggccctgctactgacactttcctcacctttcctatcgtctggttattaagggatcattccactttgggacttaatcgaagttcttagaatctcaaataaccaagaggtatttaaaacaataataaaacctgctttttaaagaaagatctttactccgtgggcttctactgctttccttccaaggggcccatattctcttggtgattacatacataattctaaatacacaggagaagctagaaatccctgaaaatgtatatgaaaatagtattatttagtgaaagactatataaagtaggattcttagatgtatatgtttcttatagttttcagtgtttatggaataccttgtaaaagtatgtactacaatgagataaatttttaaatgtggatacatgttctgcatgttatgtaagacaaatacgctgagtgggtgctcttcaaaataaaactaatgttctctcctagaaacattaagaaagactaactgttcagacaaaaaaggtaataaagttactataagccaaaaaaaaaaaaaaaaaaaaaaaaaaaa

SEQ ID NO: 19 - protein, 104 aa, Sus scrofa
MNQSAVLIFCLILLTLSGTQGIPLSRTVRCTCIKISDRPVNPRSLEKLEMIPASQSCPHVEIIATMKKNGEKRCLNPESKTIKNLLKAISKERSKRSPRTQREA

SEQ ID NO: 20 - DNA, 16125 bp, Sus scrofa
  modified_base (2290)..(2290): a, c, t, g, unknown or other
  modified_base (10685)..(10784): a, c, t, g, unknown or other
gcagtggacagtgcgccaccatggagttggggcctctggagggtgggtacttggagcttctcaacagcagtgccgaccctctgcagctctaccacctctatgaccggatggacctggctggagaagaagagatcgagctctgctcaggtgggccctcctccctctggcccttttcaagtccttccccagccctctgcctgccatggagcgctgctcagcaccacggacagctccagagcccgccccccgggggcgggctcctcgtggggacatctcccagcctgcccggctaccccctccttccccaccagccctctttcctggctctttcctgcttcatccaagtggcttttcctcccagaacctgacacggacaccatcaactgcgaacagttcagcaggctgttgtgcgacatggaagcagatgaagaaaccagggaaacttacgccagtatcggtgaggaagcattctgagccagaaaaaggacaagcgaggggaagaggcttcttttctctttggttaatctcacccactcaccaggagccagcaggccctacctcagaaatctgggccagggggatggggagtgagggctggaaggacggagaatcagggaagaagagagatggagaaggggagggaaatagaccccttcaccaatgaacaccaggcaattaagtcgcacttttacagagctcccattgtggctcagtggtaacaaccctgacgagtaaccacgagggtgtgggttcgatccctggcatcgctcagtggggttaaggatctgctattgccctgaactgtggtgtaggtcgcaggtgtggcctggatcctacattgccgtggctgtggtatagaccagcagctgtagctctgatttgacccctggcccagggacttccacacattttacatggggccctttaaaaaagacaaatctcacttttacatcctctgcctctatttctacatctttttctattagttgctcttctttccttccttcccacaaagcctatgtcatacaccgctccctctctcccaagctcccaagctaaactactctagtatttgtagtaactaccatttggggagcatttgcagcctgctaatcgctgtgcgtgtcttatcacattgaatccttacaaagacaaaggaagtagatattcttagtattttcactttacagatgaggcaactgaggtttagcgagataaagcaattcacccatgtctgcgttagagacagtaatgggcatgtctgaaattctaactgaggtcttatttttaaccacaaaaaccaaagtacctagggtggggaggtttgctaaggcttaatctaagaggctggtttgcagctttattgtttttttttttctttttagggccacacctgcagcatatggacgttcccaggctaggggtcaaatcagagctgcagcagccagcctgcaccacagctcatggcaacaccagatccttaacccacagggcgagcccagggatcgaagtcgcatcctcatggatactagtcgggtttactgctgccgagccacagtgggaattccttgtttgtagctttaaaaagagcgacacggatcccacgttgctgtggctgtggcataggctggcagctgcagctctgatttgaccgctagcctaggaacccccatatgatacaggtatggccctaaaaagacaaaaaaaaattaagagctgcattataaactacaacagaaaaaaatgttaaagactacatatgtacaactgaatcattctgctctacacttgaaactaaaacaatattgtaaatcaactatacttcaatttttaaaaagagcctcagctttcagtcaagggtagaactctttggggagaaaagtttctgttctgttgtgttttttgcggggtaggatggggtaaaggctctctccttaccagggacatcgctctcttatacagaggctttgttcaaatataaaaagatgctccttcttctggaggatggagcccccattaagaagtaacagcttgggagttcccgtcgtggcgcagtggttaacaaatccgactaggaaccatgaggttgcgggttccgtccctgcccttgctcagtgggttaacgatccggcgttgccgtgagctgtggtgtaggttgcagatgcggctcggatcccatgttgctgtggctctggcataggccagaggctacagctccgatttgacccctagcctgggtacctccatatgccacgggagcggcccaagaaatagcaaaaagacaaaaagnccaaaaaaaaaaaaaaaaaaaaaaaagtaacagcttggctatcaaagtgcagtctggatttctgccccttttgccctcttggctaggcccccttgtacagtgaacaaccttcacaactgtttttagtggcccttttcctggcaacccaggaacgacatcccttaggaggtctggcataaatgtggccagtctttccacagcacagagggcagaaaatggagaggaacagtaaccgtacgtgtctcaaaaattgcagaactgagagcctgcctgtttcctttcctttctgggaatttacttgctggaaggagaaatatttgggcctgagggtattcacagttcctcacaactggaggtagtaacgaaggatttgggctttttcccaagtcacttaggaggggggactttttccctttagaggcatctacacaggaagcgggagcatgtggaggaggcagcttcgcccaagtccgttcctcaaacctgtgctcctagaatctctggccaggtagtcatttgagcaaccttggcttctatagagataaactgggaataataatcccacctgcctcgtggaatgactgtttctgtgcataaagtgattagaacaggattttgcaaagagtgagcactcagtaagtgtcaggttccaccccaccacgaccaccaacaccgtcatgtcatcattatcatgtttgtcatcgtcttcatcaccattatatcttccctccatttcctcagcacagaagccttgtatggctccccactgcctataaaatcaagtccaaactttccccgacatgaaacttttaactgcagataccagtctctaagagtttcccaaacggctttcctccctctgtccccaccacccagaaagccctcctctttcctcctcgcagactctgccccatctttctttctttctttctttttttttttttttttttttttttttggtctttttgccttttctagggccgctcccacggcatatggaggttcccaggctaggggtctaatcagagctgtagctgccagcctacaccacagccacagcaacacgggatctttaacccactgagcgaggtcagggatcgaacccgcaacctcatggttcctagtcggattcattaaccattgcgcctcaatgggaactcctgccccatttttcaaagtctagctccaggacgtccttctctgggacatcctccctgattgccccatcccactttacaccctctcctgtatctcctgccatgataactgtcatcctgttggctccaagccaggttccacttcatacagtttacaactgcttactgagtgtcagctgtgtactgactactgtgttgactgctggaaaggcaaagcctatacgcctcaccatccatccctgaattgtaggcattacttgttctcatcacgtagaggaggaaacggggacctaactggcctaagtttgtacggctagtagggtgagtgaggggtagagctgaaatttaaactcaaacccaagacagctctactatactactggcactactttatagtactagatacacatcatccctctgattaggttaagagcccctgaagagtcagtgatcattcattcagcaaacctttatggacccccattgtgggccaggtctggacagtcatgactgcccaatgcccagcccaaggccaggcacacaataagcgtgaggtgaaaactcactgattgacggcacttttccttgtctggacagcggaactggaccagtatgtttttcaagactctcagctggagggcctgggcaaagacattttcagtaagttggggggtggggggttcttggttcagcctgcatttccttccttgttccttagggggcatggaaatacccagaggccacccttcaatgagaagtcacgttcccttcccagtgtagggacaatgagggctcatctcggacatcctctgactgtgtgtcttggtgtctttggttttttctctgaagttgagcacataggattggaagaaatgatcagtgagagcgtggaggtgctggaggactcagggcggaaaagtcagaaaagatgtgagtgagcgtgtttcccccccgccccctgccatccaacctctcctggcttcattcctggccctgccctggctctaaaacctcccagtcgcattccttgttaagccttgcctgctctgacctggctttgggtgtccccccacctctcctctcaccactgctccctcgagacccagagaggaagcaagtggcccagcagcagatggtccctctcctggtgggtctctgtttttgactgtcatttccaaaagacctctgggctctggcttctctttcatccttagttgtcacccctgtatttaagggaggtctcttcaaggacagtctttccccagcaagatctgggtttgaattccagatctgctatttaaggtctgtgtgaccttgggcaaataattacacctctctgagcctcctagtcagtctgcctgcctcctctgtctgtcctcacctggcagccaacatgggcttttgaatgcaaattcaatcatttggctggcctgcagaccctccaatggctcaaaatacataccacaaggatctgtaggatctggcccttccccctctccaaattcacgaatgtgagtcactatgctccatccagccacactggcttctttccattcctgtaactcttgtaccctttccagcctcagggcctttgcacttgctgttggccctgtctggaatgcccttcccccgtttcttcccatagtggcgcctccgaatcttgtaggtcttggccaacatgttgcctcctcccgaaggccttcttccatcaacttttccacataaattaaccttacttactttcaccttgtttgtgtctctccagcatcacagcccttgtcacaatctggacttgttttaggtattggcttttgcttagttcccccaccatggggacagggaccttgtctttcttatgtaatcactaccttccccagcacctggtacatgcctggcatgcgggagcatctccataaatatccactgaatggaaatttccaggagttcccatcgtggtgcagcagaaaggaatctgacgagtatccatgaggatttgggttcaatccctggcctcggtcagtgggtccagaaaccagcactgccgtgagctgtggtataagtcgaagatgaggctcagatcccgtgctgctgaggccttggtggaggccggcagcagccgatttgacccctagcctgggaatttccacatgcctcaggtgcagccctaaagagcaaaaaaaaaaaagaaaaaaaaatttccacaaaatgggcatcacagctaattgaatgcttactctaggccaaaccatgtgtaagccctgaacctatttaatttgaacaggtaaacagatgcatggcataaaaattcaaaaggtgcgaagaacagtcagtaaaaaaaaaaaaaaagaaaaaagagctccttcccactcgtttcccagtctttcattttccctctctgaagacaatctatgctgccagtttcctttttgtcttatattttgcctaaaagccagctctttaaaacaatgttgccccacaagtggcatttcacccaccgtctcgggcacctggctttcttcgtttaccacgtcaggacggcgatttccacaccacgatggaaaacacgtggtcctcccgcccaggaatttccctttcctttccttctttttttccttccttccccctttcttctttcttttcatttcataagcattttcccccaatattttaccatgtggtgtagggtgcagactacaaaatttctgtctttttttgcgtgtcttttagaccccaggctaggggttgagtccgagtgtaggtgccggcctacaccacagccacagcaatgcagagtctgagcctcgtctgcaacctacaccacagctcacagcaatgccagatccttaacccgctgagcgaggccagggagcgaacctgcgtcctcatggatgctagtcgggttcgttaacccctgagccacaacgggaactccgaaaaatttcagcatatagtagaggtgacagaattgtactacaagcaaccacatacccactgctgacaacctaccatcagtgttgggctatatttgccttaacacatctctatccatctgtccatccctctatcatccacccatccatccattttccaggggaacgtgtcaaaggacgttgcagacgccagtactgcccacacatccttccacatccttgttatttttagggctgcatggtatttcactgggggatgaatcatcgtttgtttcatcagcccctcgctaaggacacagctgggtttttctctgttgatgtgtgccgtgcttgatatgcactcactgatttccagtgcattcctgcaaaatgggaatcaacacccctgtttcacagatgagagaacaaaggctcagagaggctgtgtagcagagacaacacggccaggaagggcccaaaagcaggtggtttgtctttgttttttttgttttttttggtgggaggttgtttttgtttctgtaatggctgcacccatggcatacgtttccagggcagggattgaatctgagctgcagctgtggcaatgccggatcctttcacccactgcaccaggccagagatggaacctgtgccttcacagcgactcgggctgctacagtcaggttcttaacccactgtgccagggtgggatctcccacagatgtttttttcatttttattattattatttttaaactcaaactcttcctgtgtctcttctatggttctgcctcttccagtgcctcactgccctgggtgcttcaagatggggtttgggctcaagcaaaagagtgggggcagaaatggtcggaggaagaggagggaaagggaccccccaggccacttcccagccatttaaggcaaggccacaaggcctaactggggtccacaggcccgtcctggctgggtctgatgaccgtgtgttctctctgaagctttcccggaggagctgcctgcggatctgaagcacaggaagctaggtgagcagggcgggtgcatccagggagactgccaggcagggaagctggggtctcctcaggtgtgcatataaactagcatttaaaagctgaggctcagagaggtgaagccacttgttcaacatcacacagcaagtgagagttggagttgggattcagactaagatcatgaatccacagtgcgtgctctgcagttcaaggactgttgggagattcacctctacccacaaaacctattttgaactctgagtcagagctgaggacccccccaccccaccttgttccactgcccctccaggccacagctctcctttcggaaggcagcgtcacctctggtcagctggttacccggcggttcccccctcccatgcctcaatgagcctcttccccatgcctccatcccccccccaccagatgcttcctcccctcccttcctccctcctccctgattcggttgttattgcaaaggtggggaggccagctcccctgtgagaaagagactgagaaatgaaagcctcatagtctgatggaggaagcctggtctctactcccaggtctaatctgatggagaagacagggaccccaaccaggaggaccccagcgtgatggagacccccaatctgataggggaggcgagtctccgccctcctgagctcctgattcaatggaggagataaactcgtgccccagggagacagcaagtgctcgaggtccctggaggctatagaaggtggtaggggcctgggctaacaccctcttcttaggtgtgtcccgcctgcgcccggctctccaaggcaggaagtgctcagggaggaagccgggggtgggggctgtgtgacacagcacagttgctgctcagaccagcttcacccaggactgagaagaggacaggaattcccttccactgccagcagagagttccactctgctccctgagcactccccaccctgggaaggaccctcagggcacccacccagatcttaccaagcctctgacacggccccctttctcatagccgagcccctcgccatgcccatggtgactggcactttcctggtggggccagtgagcgactcctcagctcgaccctgcccatcacctcctgctctgttcaacaaggaatcaacacccagccaggcccagctggaggacgctgtcccaatgccgggtaggttaggggcttggaggggcagggcttccccttcccgcctccccgcaggtgcctgaggagtggctacttcaggagccacaagggacaggaactgctccccctactactgtcacccacttccatcccagccagtcctaccccccagggtccccctcgactccgtctgtgccagagaatgtgccctgggcatcacagcagggaatccctgccaaccagggaattcactgccagccctatgctagttcgcttgctttcctcagcagtgaaccgtgcaccctctctgggccagctgctctgctgggtgccagcaacactgtgctgggccagcagacaaagcttttcaatctcctccaggctctctcgattagagtccttgagaagggagtcagatgttaattaagatgctcaagtgctgggagtttggagttaatagatgcaaactattgccttcctgcgtggataagcaatgagatcctgccgcatagcacagggaactatatatctagtcagtcacttgtggtgggacatggttaaggatgatgtgagaaaaagaatgcatacatatgtacagctgggccactctgcagtacagtagaaattgacagaacactgtaaatcaactataatggaaaaaaataaaatctttcaaaaaaaaaaaaaacaaaaaacaaaaaagatgctaacggagaaccctaccttaccatcttggtctcttgcagcgcccccttcaggttccttgttgagctgcctgagtgtccctgctggacctattcagatcatccccacgctctccaccctgccccaggggctctggcacatctcaggggccgggacaggggtctccagtatactcatctaccaaggtgagcgtgggaagccaggctccccaccccctctgcctgtgacctgactattccctgacgccatccttttcccaccccaggcatttagtgcttacagcccagcaccttctcaggatcctccgtccccatttccccaaactcaaaagagaggagcaaagctcccgcgtgttctaagcgacccaagtgcctaagtgaccttttttggtcacttttctccacgaagccttagtttctcccttttaagaaaaataacttcattatactttaaaatccaaatatttatgtatgctcattaagaaaccaaaaaataagacctacttacaagagtcacggagtctccccatcgctctttttagtataccgttgtgaatagtttggtatggatccttgcacagctttctcaaagttgtcttgtttccgggtctgtaagaaggtccttgctgacctgccacattggagggttttaaattgtccaagggaaggcacgttgggctctcagggatgggagagagaatgaggctaaggagatatttccactcaactcaagagcatcctttgaggactttccactgtggcacagcagaaatgaatccaactagtatccatgaggatgtgggttcaatccttggcctccctcactgggttaaggatcctgtgatgctgtgagctgcggtgtaggtcgcagacacggttcggatcctgcgatactgtggctgtggtgtaggccggcggccgtagctccgaatcaacccctagcctgggaacctccatgtgccgcgggcatggccctaaaaagcaaaaaaaaaaaaaaacagtagaactgcgctgccgcttggctcacagtctccggttttacgggaatggggttagtttctgggtggtctatggccaattgtcttgcctgacccgtgcttggtccgcctcgcgcggggactttctgggtggcgcacacacctctcagccaagatggattccagcgccaaggatcctgggaagttggtggtctcctccctcccacaggcccctcccacgggcccctcccacatcctcccggttagtcttcagggcagcagcacattcctcacggggcctcctgtttcgagacacctcctgctagtggttgttatcctgcctggccgaggtggacagtttcggccagtcgtcccctaacagaagcacttgccctgctcccaaggagctggttgtgtcccttcacagatggggaaatcaaggctccgggagctccatgtcactccnnnnnnnnnnnnnnnnnnnnnnnnnnnnnnnnnnnnnnnnnnnnnnnnnnnnnnnnnnnnnnnnnnnnnnnnnnnnnnnnnnnnnnnnnnnnnnnnnnnnacgagagccagagctccagcagcttccaagtggccaggtgagtggtggcagggtccctctgcccaggtgctggacgtagaagcccaaatccgacttcccttcatgcattcacccaacacttgttcaatctctcttttgttggctcactcattcattcattcactcattcattcacatgctcattgcatcttcacatcatctcatcactcattcctctggttatacctacatttaaagctacctttaccgaggacctgccccggggaagcccatgctgggcgtcaatatctttttttttttttttttgtctttttttttgttatttctttgggccactcccgcggcatatggaaattcccaggctaggggtctaatcggagctgtagccgctagcctacgccagagccacagcaacgcgggatccgagccacgtctgcaacctacaccacagctcacggcaacgccggatcgttaacccactgagcaggggcaggaaccgaacccgcaacctcatggttcctagtcggatttgttaaccgctaagccacgacgggaactcctgggcatcaatatcttgttagcgaggctgagagagtgaatgaagggagcgtgggtgaccgagggaactaagacaggagtggggatgaaagggcagctgactgctgagtctgactctgtccctggtactccaacacaggagatgtagtaaatcaggaaagtcccaacctgactatggtccccattttgtggaggagaaaactgaggcacagtggggtatcgcacatgctcaagataatactagtaagtggtggagccaggacttaaaccagaaacatggattccactatcttaaccctcaacacacacacacacacacctccccagaatggtctcccaatcgtgagtgagcaaaagaagaaaatcttggagtgggtaaatgatggagaagatgagggaatgaatgagcgaatgaggcagctaatccagaaagccatcagggaagacgggtgaatggacgaagaagctagtgatggtggccgggctggcctctcggctgccctcctggtagccggtcctgccactagcatcctcccctcccccactcccgcctttgacctgtgcagagactgtggagcagttccaccactcactccgggacaggtaccaagccaagcccgcaggcccggaaggcatcctggtggaggtggacctggtgagggtgcggctggagaggagcagcagcaagagtcaggagagagagctggcctccctggactgggcagagcggcagccagcccgagggggtctggcggaggtgctgctggccgctagcgaccgccaggggccacgcgagacgcaggtgatcgccgtgctcggcaaagcaggacaagggaagagtcactgggcccaggccgtgagctgggcctgggctgacggccagctgccacagtacgactttgtcttctgcatcccctgccactgtttggaccggccggggaacacctaccgcctgcaggatctgctcttctccctgggcccacagcccctgcccatggacgacgaggtcttcagttacatcttgaggcggccggaccgcgttctgctcatcctggatgccttcgaggagcgcgaagcccaggacggcttcgtgcacagcgcgggcggacccctgtcctcagaaccccgctcccttcgggggctgctggctgggctcctccagcgcaagctgctgcgaggctgcaccctgctgctcacggcccggccccggggccgcctggcccagagcctgagcaaggccgacgccctgtttgaggtggccggcttctccgcacagcaggccaagacctacatgctgcgctactttgagtgtcggggggcccgtgagcgccagaagagagccctggagctcctccaggcacagccgtttctcctgagtcacagccacagcccttccgtgtgccgggccgtgtgccggctctcagagaccctcctggagctgggcgaggaggcagagctgccctccacgctcaccggcctctacgtcggcctcctaggaccagcggcccgcgaaagccccccgggtgccctggtgggactggccagactggcctgggaactgggccgccgtcaccacagcagcttgcaggagggccagttcccatcggcagaggccagggcctgggctgtggcccaaggcttggtgcagcgtgccccgggggccccgggggcccctgagctggccttctccagcttcctcctgcagtgcttcctgggggccgtgtggctggctctgagcagcgagatcaaggacaaggagctgccgcagtatttggcattaacccctaggaagaagaggccctatgacaactggctggaggctgtgccacgctttctggtcgggctggtcttccagcctcgcgcccgctgcctgggagccctggcagggctggtggcagccaccttggcggaccggaagcagaaggtgctcaacaggtacctgaagcggctgcagcccgggaccctgcaggcagggcggctgctggagctgctgcactgcacgcacgaggccctggattctgggctttggcagcatgtgctgcaggggctcccgacccaactctcctttctgggcactcggctcacgcctccggacacccacgtgctgggcagcgccttggtggctgcaggccgagacttctccctggacctccgcagcactggcattgacccctctggactggggagcctcgtgggactcagctgtgtcacccatttcaggtgggggccggggacaggagagagggcttctttgcattgagcacctactgtggttttgctgctgtgcccagtgctggctctgtggggtctcattcagtaggcatggcagccagatgtgggcagaagtgattccactcatttgaagatgaggaagccaaggctcagagagggagagtagcttgcccgaggtcacacagccagtgagaggcagcatcattcttttaaccactgtttgaaagggccatgttccaggcactgggccatgtctagagtctaagactgatctgggttcaaattcattttcttctctccatcccctgatcaagtcaccattttgtcatggttagattaaaaccacagcctcccctgacttccctgcccccgttctcgcctcttccactccattttattttattttattttattggtttttagggctacacctgtggaatatggaagttcccaggctaggggttgaatccgagctatagctgctgccctacaccacagccatagcaacgcaggatccttaacccactgagggaggtcagggattgaaccacatcctcatggatcctagtcaggttcgtcaccactgagccatgacaggaactcccccactccactttattcttaaccatcagagcaatctccctagtaattgcatctgatcatctttcatccttgcttacaatcttttagaggcactccacctccctcaggttgaagtcaaagttccttaatttaaggaatctaaatcctcctgtgatctgtttgatcccttaagccttatttccagagaatctctcctaccttccctctaagcatattttaccagagctataaggtctacaccattgtaatggttcaacggagaattcagcactgagcttcctggtagccaaagcaaaaaggaaaagaaaacccaggagagctaagaaaaaggaggaattgataagggcttaagtggtcatggaaggctttctagagaaagtagggggttaagctgagcaaagaaagtacctgaataggtaggaggtcccttcatggagttgcccatccgttatggtctagcccggtcaccatgcctgggtctgaggcccttcctccacagggccgccttgagtgacacagtggggctgtgggagtctctacagcaacgtggggagaccaagctactccaggcactggaggagaaatttaccattgagcctttcaaggccaagtccatgaaggatgtggaagacctgggcaacctcgtgcagatccagaggtgaggaggaaagggcacgggaggtggtccaggccatgcaggtccattacatttgtcattagcacttccagtgcctcatctttgggggatatcccatgtcctccgcttggacagtggccacccagaatctctcactgttgtcaccacccatgcagaactcccaggatttatcacttggtcccattaaaaacttgcagtcatgttcccaatttttttttttcttttttaggaccacaccttcagcttatggaagttcccagatgaggggtcaaatcggagctatagcttctggcctatgccacagccacagccacagcaataccagatccaagccacatctgtgacctacaccacagctcatggcaatgcttgattcttaactcactgagtgaggccagggatcgaacccgtgtcctcgtgtgtactagccaggtttgttacccctgagtcacaatgggaatccccctaattctttctcagctaaagccagggaactattctctgctgctaagagttcacgagctgccttctgcatctagtaacagaagtgacactatggccacctttcaaggcagccaggaccagtatcatccccatttttttgatggcagagatctaatgtctagtgggtagaggacacttgaccacagaacaactgcctttccctcattccttcatcatacattgttcgagcacctactatgtgctgtctgggatgggatgggtctcctctgaggctcttttccatgaaacacacaggaatattagccttcataacatcctgttctgaggcttttctttttaagaagggcataacaaggagttcctgtggtggctcagcaggttaagaacccagctagtctccatgaagacaggggttcaatccctggccttgctcagtgggttaagaatctggtgttgtgtgaactatggtgtaggtcgcagacacagcttgggatcccacgttgctgtggctgtggcgtaggccagcggctacagctccaagtccccccctagccttggaacttccttatgccacaggtgcagccttaaaaaaaaaagaaaaaaaagaaaaaaaagaagggactaaccatagcccgggaaaggcagtccttctggggaattttgggaatgtggcatgcatcttagtacatttaggaagggactcagcgacaggtgaaggtcccctgacattgcccattctctccatctctccaggacgagaagctcttctgaagacatggctggggaactccctgctgtccgggacctaaagaagttggaatttgc

SEQ ID NO: 21 - DNA, 4456 bp, Sus scrofa
ttttttcacttcacgttttggatgctgcaggccgggtaagcagagatcccaaggctctggcccccggggaagaggccctgtctccgagccctaccatgaaccacttccagaccatcctgactcaggtccggatgctgctgtccagccatcggccgagtcaagtgcaggcgctcctggacaacctcctggcggaggagcttctctccagggagtaccactacgccctgctccaggagcctgacggtgaggctctggccaggaagatctccttgacactgctggagaaaggagccccagacctggccctcttggggtgggtctggagtgcactgcagaccccagcagccgagaaggaccccggctaccaggaacctgatggcagtggacagtgcgccaccatggagttggggcctctggagggtgggtacttggagcttctcaacagcagtgccgaccctctgcagctctaccacctctatgaccggatggacctggctggagaagaagagatcgagctctgctcagaacctgacacggacaccatcaactgcgaacagttcagcaggctgttgtgcgacatggaagcagatgaagaaaccagggaaacttacgccagtatcgcggaactggaccagtatgtttttcaagactctcagctggagggcctgggcaaagacattttcattgagcacataggattggaagaaatgatcagtgagagcgtggaggtgctggaggactcagggcggaaaagtcagaaaagatctttcccggaggagctgcctgcggatctgaagcacaggaagctagccgagcccctcgccatgcccatggtgactggcactttcctggtggggccagtgagcgactcctcagctcgaccctgcccatcacctcctgctctgttcaacaaggaatcaacacccagccaggcccagctggaggacgctgtcccaatgccggcgcccccttcaggttccttgttgagctgcctgagtgtccctgctggacctattcagatcatccccacgctctccaccctgccccaggggctctggcacatctcaggggccgggacaggggtctccagtatactcatctaccaaggtgagatgacccaggccagccaagcaccccctgtccatagcctcccaaagtccccagaccggcctggctccaccagtcccttcgccccgtcagcagctgacctccccagcatgcctgaaccagccctgacctcccgggcaaacatgacagagggcagtgtgtcccccacccaatgctcaggtgatcaagaggcctccagcaggcttcccaagtggccagagactgtggagcagttccaccactcactccgggacaggtaccaagccaagcccgcaggcccggaaggcatcctggtggaggtggacctggtgagggtgcggctggagaggagcagcagcaagagtcaggagagagagctggcctccctggactgggcagagcggcagccagcccgagggggtctggcggaggtgctgctggccgctagcgaccgccaggggccacgcgagacgcaggtgatcgccgtgctcggcaaagcaggacaagggaagagtcactgggcccaggccgtgagctgggcctgggctgacggccagctgccacagtacgactttgtcttctgcatcccctgccactgtttggaccggccggggaacacctaccgcctgcaggatctgctcttctccctgggcccacagcccctgcccatggacgacgaggtcttcagttacatcttgaggcggccggaccgcgttctgctcatcctggatgccttcgaggagcgcgaagcccaggacggcttcgtgcacagcgcgggcggacccctgtcctcagaaccccgctcccttcgggggctgctggctgggctcctccagcgcaagctgctgcgaggctgcaccctgctgctcacggcccggccccggggccgcctggcccagagcctgagcaaggccgacgccctgtttgaggtggccggcttctccgcacagcaggccaagacctacatgctgcgctactttgagtgtcggggggcccgtgagcgccagaagagagccctggagctcctccaggcacagccgtttctcctgagtcacagccacagcccttccgtgtgccgggccgtgtgccggctctcagagaccctcctggagctgggcgaggaggcagagctgccctccacgctcaccggcctctacgtcggcctcctaggaccagcggcccgcgaaagccccccgggtgccctggtgggactggccagactggcctgggaactgggccgccgtcaccacagcagcttgcaggagggccagttcccatcggcagaggccagggcctgggctgtggcccaaggcttggtgcagcgtgccccgggggccccgggggcccctgagctggccttctccagcttcctcctgcagtgcttcctgggggccgtgtggctggctctgagcagcgagatcaaggacaaggagctgccgcagtatttggcattaacccctaggaagaagaggccctatgacaactggctggaggctgtgccacgctttctggtcgggctggtcttccagcctcgcgcccgctgcctgggagccctggcagggctggtggcagccaccttggcggaccggaagcagaaggtgctcaacaggtacctgaagcggctgcagcccgggaccctgcaggcagggcggctgctggagctgctgcactgcacgcacgaggccctggattctgggctttggcagcatgtgctgcaggggctcccgacccaactctcctttctgggcactcggctcacgcctccggacacccacgtgctgggcagcgccttggtggctgcaggccgagacttctccctggacctccgcagcactggcattgacccctctggactggggagcctcgtgggactcagctgtgtcacccatttcagggccgccttgagtgacacagtggggctgtgggagtctctacagcaacgtggggagaccaagctactccaggcactggaggagaaatttaccattgagcctttcaaggccaagtccatgaaggatgtggaagacctgggcaacctcgtgcagatccagaggacgagaagctcttctgaagacatggctggggaactccctgctgtccgggacctaaagaagttggaatttgcgctgggccctgtcttgggcccccaggctttccccaaactggtgaggatccttgaggccttttcttccctgcagcatctggacctggactcgctgagtgagaacaagatcggggacgagggtgtcgcccagctctcagccaccttccctcaactgaaggccctggagacgctcaacttgtcccagaacaacatctccgacgtgggtgcttgccagctggccaaggccctgccctcgctggccgcgtccctcctcaggctgagcttgtacaataactgcatctgcgatgtgggagccgagagcctggcgcatgtgcttccagacatggggtccctccgggtgctagatgtccagtacaacaagttcacagccgccggggcccagcagctcgccgccagcctgagaaagtgccctcacatggagacgctggcgatgtggacacccaccatcccgtttggtgtccaggaacacctgcagcagcaggactcaaggatatcctgagatgatccaggctgcacccgggacaagcacgttctctgaggacgctgaccacgctggaccctgacctgatcatctgtggacacagctcttcttaggctgtgtcccgtgagctttggcgatctggtgcccagccctggtggctcagagtcagcccccactctgctggggaaaggacccacggcctgctctgtggacagaccccaggcccggccccaggctccttcggggcccagactgatgtcagccttgctcagccgctgcagtcctggcagacaggcgggcacccagtggcagsyagggkccacccgggagccctgaagcactccctgcaggacactgcagacagtggtggccaggtcagagtgagggatgtggcggccacatcacctgcccaggtcctgctggccgggggagaaagcacctctccacactgctcccctggtggggtaagcttggcgctcagaagataccagccagcaccccccagcgtgttgatttcccaaacggtgaccgacggggtgtccacggcagctgccctctgcctccggcacctgcgggtttgcactcactttgtttgccgaggccaaagctgggcctggccagacacgccrgaccttagcgggggaagagccgacagtacactacgggmcgaggyrgggtggcgagggtctggaaccacatccgccttcttgccctcacgtcctgtgtcttttttcactacattatacatggcttattcagtctca

SEQ ID NO: 22 - protein, 1204 aa, Sus scrofa
MNHFQTILTQVRMLLSSHRPSQVQALLDNLLAEELLSREYHYALLQEPDGEALARKISLTLLEKGAPDLALLGWVWSALQTPAAEKDPGYQEPDGSGQCATMELGPLEGGYLELLNSSADPLQLYHLYDRMDLAGEEEIELCSEPDTDTINCEQFSRLLCDMEADEETRETYASIAELDQYVFQDSQLEGLGKDIFIEHIGLEEMISESVEVLEDSGRKSQKRSFPEELPADLKHRKLAEPLAMPMVTGTFLVGPVSDSSARPCPSPPALFNKESTPSQAQLEDAVPMPAPPSGSLLSCLSVPAGPIQIIPTLSTLPQGLWHISGAGTGVSSILIYQGEMTQASQAPPVHSLPKSPDRPGSTSPFAPSAADLPSMPEPALTSRANMTEGSVSPTQCSGDQEASSRLPKWPETVEQFHHSLRDRYQAKPAGPEGILVEVDLVRVRLERSSSKSQERELASLDWAERQPARGGLAEVLLAASDRQGPRETQVIAVLGKAGQGKSHWAQAVSWAWADGQLPQYDFVFCIPCHCLDRPGNTYRLQDLLFSLGPQPLPMDDEVFSYILRRPDRVLLILDAFEEREAQDGFVHSAGGPLSSEPRSLRGLLAGLLQRKLLRGCTLLLTARPRGRLAQSLSKADALFEVAGFSAQQAKTYMLRYFECRGARERQKRALELLQAQPFLLSHSHSPSVCRAVCRLSETLLELGEEAELPSTLTGLYVGLLGPAARESPPGALVGLARLAWELGRRHHSSLQEGQFPSAEARAWAVAQGLVQRAPGAPGAPELAFSSFLLQCFLGAVWLALSSEIKDKELPQYLALTPRKKRPYDNWLEAVPRFLVGLVFQPRARCLGALAGLVAATLADRKQKVLNRYLKRLQPGTLQAGRLLELLHCTHEALDSGLWQHVLQGLPTQLSFLGTRLTPPDTHVLGSALVAAGRDFSLDLRSTGIDPSGLGSLVGLSCVTHFRAALSDTVGLWESLQQRGETKLLQALEEKFTIEPFKAKSMKDVEDLGNLVQIQRTRSSSEDMAGELPAVRDLKKLEFALGPVLGPQAFPKLVRILEAFSSLQHLDLDSLSENKIGDEGVAQLSATFPQLKALETLNLSQNNISDVGACQLAKALPSLAASLLRLSLYNNCICDVGAESLAHVLPDMGSLRVLDVQYNKFTAAGAQQLAASLRKCPHMETLAMWTPTIPFGVQEHLQQQDSRIS

SEQ ID NO: 23 - DNA, 45862 bp, Sus scrofa
cacatgaactggacaggccccaggtacataagaaaaaggcccctagtccagtagccaataggattcctcctttctgaaagtcacagcgcttttccttcctgagcagagtgggggcgggggaataaagttgcggccacagagtggacttgagctccccctggaggcccaaacgattatttgcaccaacttgtcctggcttttggagttgagcgggaagaatccgagggtcttcattcaccgtcctggaaggatagttttgtcagtggttttggtccaggctgctcggttgtgcctgaaaagtcacggctgaagggagcgctgtgtgacggttattgtttgtgccttgacttttgcttccaaatcagcccaaaagaaactctgctttttttttttcttttctagggccaaacccatggcatatggaagttcccaggataggggtccaatcagagctgtagccgccggcctacaccacagccacagcaacgccagatccaagcctcgtgtggagactacaccacagctcacggcaacgccgggtacttcacccactgagcaaggccagggatcgaacctgcaacctcatggttcctagtcggattcgttaaccactgtaccacgacaggaactccaccctttctgttttgaaaggcacacagacaaagaaaacagtcgtatttattattctggacactttgcttctaagtcataggaagcaactcagattaggttaaagaaaaatggggaattataagggcactgtgttttataaaatcccagggcaggactgtagccagagctcaggaaagaaccagaaggttttcagaagtctctcatttcagctcagtggttaacaccctccgagagttccattttaactttgctgtggtggcacagcagaaccctctccccaaggaaggtgacaggaacgtccttaaaatgaggaagaaccgcatggcccaatcaccctctctacacgtatgcacagcccagactgtacccaataagactgcaataaggctatatgttaccatataaaggggacaaaggggtaaaaataatataaaaggcatctcctcactgtgctcagggctcagcctttggacatgaatctgtcgagccagtgccggcatgaataaatactgcttcctggaaaaaagccttggtgggtgtcccatctctgtacgtaagtcctacaacagttccttcctgctagagtagaaggttccagatcctggggcagggaagaggttcctagaacctactgatgataactacagcacatcaaaacagtccctgctgggggatgttggagcatgcaacaactgccatgaaagtggacaactctatctccctgtatcaagagtgcatgtttcaggagttccctagtggctcagagggttaagaatctaactaatatctatgaggatgcaggtttgatccctagaatagttcagtgggttaaaggatctggtgttgcagtgtagatcaaggatgtgcttggatctggtgttgctgtggctgtggcacacactggcagctgtagctctgattcaacccctagcctgggaacctccatatgccgagggtgcagccctaaaatgacaaaaacaagaaaacaggaatgcaagtaagtcaggagttccctggtggttcagtgggttaaggatctggcattgttactgctgtggtgagggttttattcctggcccaggaacttctgcatgccacaggcacagccaaaataaataaataaataaataataaattaagtggagttcccgtcgtggcgcagtggttaacgaatccgactaggagccatgaggttgcgggttcggtccctgcccttgctcagtgagttaatgatccggtgttgctgtgagctgtggtgtaggtcgcagacgcggctcggatcccacgttgctgtggctgtggcataggccagtggctacagctccgattggacccctagcctgggaacctccatatgccgcgggagcggcccaagaaatagcaaaaagacaaaaaaataaataaattaaataaataaataaattaaataaattaagtaaaatttaaaatttctaggagttccctgatggtctggaagttaaggatttggagttgtcgctgctgtgactcaggttgaatctctggcctgggaacttctgcaggctgtgggcacagccaaaaaaaaaaaaaattaagacaaaaaaacaaagcaaataattcatcaggaaggcagaaattttttggaagcagacctaggagaaaataaatatttgtttaaatatgtaaatgtttatttatattttaactattttatatatttaactttccttttttttttttttttttttttgctttttagggccacacctgaattatatggaaggtcccaggggaggggtcaaatcagagctgcagctgctggcctacaccacagccacagccactcgagatccgagccacgtctgcgacctacaccacaccacagctcacggcaacgccagatccttaacccattgagcaaggcgagggatcgaaccttcaatatcatgattcctagtcagatttgttaaccactgagccatgacaggaactccagtcatcttttgttttgaggacataaagtaagaggtatagagaagcacttccccaggggtctgaacaatgtataggctatttagggaaacaggtggttattataactggaggtttgtactttttttttttggtctttttgtcttttctagggccaaacccatggcatatggaagttcccaggataggggtccaatcagagctgtagctgccggcctacaccacagcccatagcaacgccagatccaagccgcgtgtggagcctacaccacagctcacggcatcaccggatccttcacccactgagcgaggccagggattgaacccgaaacctcatggttcttagtcagattcgttaaccactgagccacgatgggaactccagaagtttgtaccttttgaccaccttcaacgaggggctatttagggaaacaggttatgttgtcccagtgctgagccctagatcccgagatgcccaaatgttcatcagtaaatatatgtgttttttttttttttttttgccacaccagcagcacgcagaaggttctgggccagagatccaacctgatccacagcaccgacaatgccaaaccttaaccactaggccaccagagaactcctatgtatttttttcttccagtttataattcacctacagcactgaatgagttgtagagcataatgactggacttgcatacgtcatgaaatgattaccacaataagtttagtgagtgagttcccactgtggctcagcagtaacgaacctgactggtatccatgaagatgcgggttggattcctggcctcgctcagtgcgtttaaggatctggcattgctatggctgtggtgtaggcgggcagctgcaggtctgattcaacccctaggctgggaacttccatatgccacagatgcagccttaaaaaacacataaaaataaaaataagtaagtttagtgaacatccattagctcacataaataaaaaattaaatagaaaaaaattttcgttgtgatgagaacttataggatttattctcttaaccactttctttctttctttcttttttttttttttttgtctttttgccatttcttgggccgctcccacgacacatggaggttcccaggttaggggtccaatcagagctatagccgctgacctacgccagagccacagcaactcggacggaatccgagccgagtctgcaacctacaccacagctcatggcaatgccggatccttaacccactgagcaaggccagggatcgaacccacaacctcatggttcctagtcggattcgttaaccactgagccacgacaggaactccagactcttctttttttttttttttttaagggctgaactcgaggcatgtggaggttcccaggccaggggtcggatctgagctgtagctaccggcctataccacagccacagcaacacaggatccgagccacatctgcgacgcacatcatagttcacggcaacactggatccttaacccactgagcaaagccagggattgaacctgcgtcctcatggatgctagtcagattcagttctgctgaacaatgatgggaactccccatgctgactcttaagataacagagagagcctgcctcatcatgatggccagattctgtacttgacatgggtcttgaatggtcagcaactgatctcaaggccctggaatttagtggcttagccttacactggcacctcagcagagggtcccagatcaatcccaggcattctagtaggtgtcctttttttttttttttttggtctttttgccatttcttgggccgctgctgtggcatatggaggttcccaggctaggggtccaattggaactgtagccgccggcctaccccacagtctcagcaacgcgggatccgagccgtgtctgcgacctataccacagctcacggcaatgccggatccttaacccactgagcaaggccaggaatcgaacccgcaacctcatggttcctagtcggattcgttaaccactgagccacgacgggaactcctcttttttctttttaatggctgcacccacaccatatggaagtgccctggccaggggtcaaactggagctgcagctgctggtctacaccacagccacaacaacactggatccaagctgtatctgtgacctactccacagctcgcggcaacgccggatctttaaccaactgagtgagaccagagatggaacccgaatcatcacagagactgtgtggggtcttaatccactggaccacaatgggaactccgagaatatgcctttatggtagggagtctgacgcctgggaaacctttattctggcagggcgtggtttaccgcagtgatcgcctccctctaattgcctgcatcccatccctgtgccgggctccaggtgagctgactccacagagctctcctcacctgccggggcccttgtgacttctctcttctctggtcccccaaccctgctgctcaatcctactagcggactgaaccgaacgaggctgccacctcctcaaggcaaggaccctgggttcttcacattatttgagtccacaaggtaggaccaaaggaaaatttgtggaggacagtgatgctggagatgatctgtgatataatttccagcaagtaaccttcaaggacccagcagccatcttttttttttttccactgtacagcaaagggatcaagttatccttacatgtatacattacaattacattttttcccccaccctttgttctgttgcaacttgagtatctagacatagttctcaatgctattcagcaggatctccttgtaaatctattctaagttgtgtctgataagcccaagctcccgatccctcccactccctccccctaccatcaggcagccacaagtctcttctccaagtccatgattttcttttctgtggagatgttcatttgtgctagatattagattccagttataagtgatatcatatggtatttgtctttgtctttctggctcatttcactcagtatgagagtctctagttccatccatgttgctgcaaatggcattatgtcattctttttaatggctgagtagtattccattgtgtatatataccacatcttcagaatccagttatctgttgatggacatttgggttgtttccatgtcctggctattgtgaatagtgctgcaatgaacatgcgggtgcatgtgtctcttttaagtagagttttgtccagatagatgcccaagagtgggattgtggggtcatatggaagttctatgtatagatttctaaggtatctccacactgttctccatagtggctgtaccagtttacattcccaccaacagtgcaggagggttcccttttctccatagcccctccagcacttgttatttgtggatttattaatgatggccattctgactgatatgaggtggtatctcatggtagttttgatttgcatttttcttataatcagcgatgttgagcattttttcatgtgtttgctggccatctgtatatcttctttggagaaatgtctattcaggtcttttgcccatttttccattgattgattggcttttttgctgttgggttgtataagttgtttatatattctagagattaagcccttgtccattgcatcatttgaaactattttctcccattctgaaagttgtctttttgttttctttttggtttcctttgctgtgcaaaagcttttcagtttgatgaggtcccatgggtttatttttgctctaattcctattgctctgggagactgacctgagaaaatattcatgatgttgatgtcagagagtgttttgcctatgttttcttctaggagtttgtcctgtcatatatttaagtctttcagccattttgagtttatttttgtacatggtgtgagggcgtgttctagtttcattgctttgcatgcagctgtccaggtttcccagcaaccagcagccatctttttgactgaagatacactcttcccagtgagatggaatcagatgatgggagatactatatgtacaaatgcttcccacatagtaaggcatcataacacagtaatttttgtttattcttttttggtcttttttttttttatggccacacacttagcatctggaagttcccaggctagggggcgcatcagagctgcagctgccagcctatgccacagccacagcaatgccagatccttagcccactgagcaaggccagggatccaactcgcatcttcgtggatagcagtctggattgctacctctgagccatgatggaaactccgccgtaatcgttatgaatgaagtctccattgcccacctcagtgactggtccatttctaatgaccctgtacttttattggtacttccagtaacggagtcagacccacctgcctaccctgctccctgggcattacaatgcttatcttatgaggagttcaaatattggtatcccagccaccgcatccgctgacttagatacttgcaaccaggcagctcagcgcttttccaatgcccagataccttaggtggcacattggagatagttcttgaagtagtggagagccaacttgaatttgatctgggcttcggtgttggcccgataactggtgtagttcccctccagggtggccagctctgggtccatcactggtaaatggggctggtgacctatgatcacatgtgggcaggaccccacgagcaggctcccgagcccatcaataaagaactctgccaagagagggagagagcgcgagaaggaaacgtgagcttcaaaccagagacccgggccaatactgcgactctgggaggagggctggggtggggggggacatagcttctattctggggaggttcagtcccatggcaaagccactgagttggaagatcagacagatatcagcagagagacacagattagcagaccccaggactgggaggaatgagaggggaagaggtggggtgctgctcaccagctgcagctaaacagagaaggatgtctggaaaaggaggagcaggaaattcccgtcatggcgtagtggttaatgaatccgactaggaaccatgaggttgtgggttcggtccctggcctcgttcagtgggttaaggatctggcgctgccctgagctgtggtgtaggtcacagaggcagctcagatcccgtgttgctgtggctctggcataggccgggagcaaaagctccaattcgacccctagcctgggaacctccacatgccatgggtgcagccctaaaaaggcaaaaaaaaaaaaaaaaaaaaaaaaaaaggcaaaaaaaaggaggagcagcagcaagacaaggaaagagggaaggggcagagctgcagggagaggaggtagaagggtgtctcggagaagcaggaatagcctatgggagacacgaaggtggagggaggcaagagagaccaagagctccctagtttggggagaaggggctgcttccctgagcagcagggccccgccctccctcagaaagagacttctgaagccagcgcacagcccagctcgcttcttgcccttccagcctccccacctgagtgagccactcgctgcagccgggggtcgaagccaattctttggagtcgctctgtgtgagccaggaagaagttgacaacaccactggtcaccacgcagtcggggaagccatccacgggccggaaaaatcctggctgctggtggagacagtcgccattcttcccctgctccagcaacagcttgaactggaatgtgttttcaatcacgctgccacctacctagccagcgggaggagaaatctgttagagaacagactccatatccaaggagcctgtgccaggaagccttactggactgaacctcagtcacgacaagaattgcactccctggagttcccgttgtggctcagtggttaacgaatctgactaggaaccatgtggtttcgggttcgatccctggcctccctcagtgggtgaaggatccggcgttgctgtgagctgtggtgtaggtcgcagacgtggctcgtgagctgtggcataggctggtggctacagctccaattggacccctagcctgggaacctccatatgctgcgggagtgacctaagaaatggcgaaaagaccaaaaaaaaaaaggtaataataataataaaataaaataaaataaaaaagaaaaagaattgtactccctgtcttatctacccttcatgttacacttccgccaagtccaaagggcagcaaagtttctgctgcacttaccctccagcaagctcactctttccagagggccactccctcccctcccttctgctacaaggatccaggaggatcgaggatgggggatcgcgtttgggtgcaggtgagaggcagccagcgtgcagccgtccctacgtggacttcctgagcaagcctttgtctcaagttgtctccctcccattctctgcccctggctcacttctctgcgccgtctgtccacacaccacacactcctgggagctcgcagctttgtgtgagcccgagcacagcaggacaagcaagtacatctattcctgaaccatcataatcacctagggaggcagagcagaatctgccagttgccccccaccccctcgcctgttctttccttcctcctcttaggaaatgagccccctgaggtgttttttggtttttgtttttcctttttcagctgcccctgcagttcccaggccggggatggaatccaagccagagctgcacccaccccacccccacgcagcaacgctggatacttaatttaacccacggcacaggactggggattgaatgggcacctccacagagacaaactggatccttaacccccatgccacagtgagaactccaaactccaaaccctctgagatttaagtggactaaattaagcgacaatgatcctacgaaagatgaaatttccccacttctctggagttcccaatgtggctcagcggtaatgaacctgaccagtatccatgtggacgtgggttcactccctggcctcctcgagtgggttaaggatccggcattgccgtaagctgtggtgtaggtcacaaaatcagctcaggtcccatgttgctatggctgtggtatagacgggcagctgcagctccaacgggacccctaggttgggaacttccatgtgccctacaaagaagaagggaggaaggaagggaaagagggagggagggaaagaggagagagagggagggaggaaggaaggaaggcagggagaaatggcccacagcatatggcttgaatcccagctgcagctgcagcaatgccaaatcctttaacccgctggactgaaccagcacctctgcagcaacccgaaatgctgcagtcgggttcttaacccactgtgtcacagtgggaactccctgaaaggatgtgatttagaacagatgtctccaatttttaaaaagaccacattcttctcatcttttcctttttttttttttttttttttggcttcttaaggttgaacccacggcatagggggttagtggttagtttccaggctaggagtcaaattggacccacagctgttggcctacaccacagccacagcaacgccagatccaagcctcgtctgtgacctataccatagctcccagcaatgccagatccctgacccactgaacaaggccagggatcgaacccacatcctcatggatactagtcagattcatttctgctgcgccacgaagggaactcccaagaccacattcttaaaagaaaactgttgtcttctactccctctctccccctttcttctgaccgtgcagctgagggccacaaagatggatgaacaacagggaaggaagctggaccaggatgaccctggaaagagacaatagggccagcttgcattctctctttttttttttttttttttttttttggctttttgctaattcttgggccgctccagcagcatatggaggttcccaggctaggggtccaatcggagctgtagccgccggcctacgccagagccacagcaacgcgggatccgagccgcgtctgcaacccacaccacagcccacagcaacgccggatcgttaacccactgagcaagggcagggaccgaacccgcaacctcctggttcctagtcggattcgttaaccactgcgccacgacaagaactccccagcttgcattcttacacgggtaggaactgcaccttttttgtcatttatgctattgtgactgggtctctagaagagtagcaaagagacatcttcgtcaatccagatgttttgggggactgtccacctggaataagagataactgtggtcacggtgctacttatccactttctttccaggccgggatagaaccagcaccacagcagtgacaatgctggatccttaaccctatgagccaccagggaactcccatctttctttttccaaacagctttattgagatatctttgatatattaaaactgtatgaaggagttcctgtcgtgtctcaatggttaacaaatccaactaggaaccatgaggttgcggattcgatccctggccttgctcagtgggttcaggatccagcatttttgtgagctgtgatgtaggttgcagacgcggctcggatcctgcgctgctgtgtctctggcgtaagccggtggctgcagctccgattggacccctagcctgagaacttccatatgccgcgggagcggctcaagaaaatggcaaaaagacaaaaagacaaaaaacaaaacaaaacaaaacaaaacaaaacaaaaaactgtatgtattgaaggtgtacagcttgatttttttttttttttttggtctgtggcatgtagtggcttgatgcaggatctcaattcccagaccagggactgaacctgggccacagtggggaaagcaccaaatcctaactactacaccaccagggaactccctgcagcttgatgttttgatatatgtagacactgtgaaaagatcaccacacgcaagctaattaatgaattcatcacctctacacagtgtgggtatcttcacaaatttcaagaacgcaatgcagtattattaactattcatcaccttttttcccccttttccatgtgtaaattaacttttgatatttgtggggttttttgttctgttttgttttgtctttttagggctgcacctgcagcatatgaaagttcccaggttagcagtccaattggagctgcagctgccagtctacgccacagtcactgccacagccacagaaatgccagatctgagccacgtctgggacacacaccacagcttatgcaacaccagacccttaacccactgagcaaggccacggattgagcccacatcctcatggacactagtcgggttcattactgctaagccacgacgggaactcctgtgttaattttttattgtcattaaggccacgtgtgcttttatagctttgtgccattttcatttttgtgatggtgtgtgacaaaaccagagcagcactcacattcctctccaactctcaccagtccagagaggaagttggaagtgatgcatacaaagaaaaccacagctttcaaaagatacacgcaccccaacgttcacggcagcactattcacaatagccaagacgtggaaacaacctaaatgtccatcaacagatgagtggtgtacacacacacacacacacacacacacacacaatggaatattactccctcatgaaaagagtgcaataatgccatttgcagcaacgcagatggacctagagattatcatactgaatgaattcagagaaagacggatatcatatgatatcccacatatgtggattcaaaagagatacaaatgaacttatttaccaaagagaaacagactcatagatttagaaaacaaccttatggctaccaaaggggaaaggtggctggcgtggggagggggtggagggataaattaggaaattgggattaatatatacatactaccatatataaaatagataggagttcccattgtggctcagtgagttatgaacccaactgtgatccatgaggatgcaggttcaatccctggctttgctcagtgggttaaggatccggtgttgctgtgacctgtggtgtaggtcacagatgcagctcaggtctgatgctgctgtggctgtggtgtaggccagcagctacagctccgatttgacccctaacctgggaacctccatatgcctcggatgcagccccaaaaagaccaaaaaaaaaaaaaaaaagataactgacaaggacctactgtatggcaaagggaagtacacgcaattattctgtaatttcctacgtgagggaaggaatctgtaaaagaatgggtatagctgaatcactttgctgtacacttgaaactgatacaccatggtaaatcaactctactccaatagaaaatacaaattagggttttataaattttataaaaataaaataaaacctaggccacctggtggcctagaggttaaggatccaacattctcactgctgtggcacaggcgggatcaggctggatccctggcctgggaacttctgcatgacataggtgtggccaagcaaaaaaaaaaaattcaattaaaaaaaatgactgggagttcccattgtggctcagtgattaagaaacccaactagtaaccatgaggttgcaggtttgatccctggcctcactcagtgggttaaggatctggccggcattgctgtaaagtgtggtgtaggccagcagttacagttccaactggacctctagcctgggaacctccagatggggcaagtgtggcactaaaaagacagaagacaaaaaaaaaaaagattgaaaaaagtgcctaaacacacttttttcttttgccatttcttgagctgctccctcagcatatggaggttcccaggctaggggtccagtcggagctatagccgctggcctatgccagagccacaacaacgggcaattcagccgcatctgcaaactacaccacagctcacagcaatgccggatcctgaacccactgagcaaggccagggatcgaacccacaacctcatggttcctactcggattcgttaaccactgagccacgacgggaactccacaacacactttaaggacagaacaacggtgagtctggggagtggggttggtgtgatttgttcaaagaaaagtaagaatggaggcagaagcagaatccgagggtctcatttccgtgcgagagtctcaatcccagagctgctctgcatcacctcctgcacggcccttccccttccgcctccctcttccccccccccccacccccgtcccttttcctctcctctttcctcctgtcctttcctctctgccctctcctccccctccccctctggctcgtcagatggcaatggggtagaactggcagcgctcagctcacttaccacgtccagttccgttttctctaggacgtccaccagcgcctcgatcctggtcttgctgttgaagatgaagtcatcgtccacccagagcacatatttggtggtgacctgagatatggccaggttcctgccagcaaaccagccctgcgagggcagggaggttagacccgtggttgcccgccccgctgcctcctagcatcacctgggggctttctcagctcccaagggtcaggctgccccccagacagtggctgagaacctctgggctaaagggagtccatgtctcagagaccctggaagaaggagagggactctctggagacgagaaagtccctccttggccctgtggcttgagggatggatgcaagtccctttacacctgacagtctttgtggccctttcgccctgtgttgcctggaagatgctggagggtggggctctctggaaggggtaacatccacttcctcccggtgtgctcgagggaaggtgtggggcgcggagagagacaccccagcaagggtgaaatcatgacagaggtttctctgctgtgggacctgcgtatcaggaaaccttagagcgtcagacaccgccagtcgcttacaaggacctccatcaatttccacaccaagcgtgaggaaagacagattacccaccccgtcactgcaggaaagggagagtgacctgatttctccgggaatttggaggcagccaggggactcagaggagtccccaccccccgccccccaaggatcctgctgccgtgggagggtcccccccaaccccgaagcagccccaaccagggtaccacttgaccctggggccctctggtcccaaggtgcccgtgtctccccctctgggaggaatataccttcccaaatggcatggtgtaatactccacgtggctgtcagtgattttcaggggctccttgctgtcatcggccacgatcaccgtcaggtctgggtagtactcacgaacactccggagcatggtcatgagcttgtggggacggaggaaggttttggtggcaatggtcaccaggtctcggagcttcctctctgggcaagaaagggtaggtgtcagagctctgtcttcaagaatcctcactgacgtgcattgctctggaggtttctttacacggcgctgtctcgagtgtttgtggacctcatgccttttgttcacagttgatgttagttggatcagaaaatacattttattattattattttgtctttttgtctttttagggccgcacctgcagcatatggagggtcccaggctaggggtcagctcagagctacagctgccggcctacaccacagccacaccaacacaggatccgagcctcatctacaccacagctcacggcaatgccggatccctaacccactgagcgaggccagggatcaaacctgcatcctcatggatgctagttagattcgtttccgctgagccatggtgggaactccatgagtcagattctcaacccactgagccacaacgcgaactcccaatttgtttaaatggtttctgtcttctagagtgtctccctttttttttggttttttttttgttttttgcttgtttgtttgttcttttcttagtagctgcacctgcagcatatgtaggttcccaggctcccaggctcccagttgaatcagagccgcagctgcaggcctatacctcagccacatcagatctgagccgcatctttgacccacatcacagctggcagctatgcagatactgaacccactaagtgaggccaggggttgaacctgcatcctcacagacaccatgtcaggttcttcacccactgagccacaacgggaactcctctcttctggttctgttggctccagtctgctgtttccttctgtcgagtgggatgcttcaagttctgcctgcctatctgcacttggtttgcaaccggctttcatgctgttactgggaattgagacgcatagagtttcacccatcaagggattcaatatgaccagtcgtgaggcccaggaagaggggaaaagatttaaagacctgagacctgccctgtcacagctgcaatcctacagagagacgtgcctggcctggtttgtttttttttttttgctttttttagggccgcacccacggcatatggaggttcccaggctaggggtcgcattgtagctacagctgctggccacagccacagccacagccacagcgatgccagatccgagccgagtctgcagcctataccacagctcatagcaacgccggatcctcaacccactgagcaaagccaggaatcgaacctgaaacctcatggacactggtagggttcgttaacccctaagccacgacgggaactccttgtggttcttatccatgttcttttcttactgattcataagtcctctgaagtaaaattagacctttgactttcgtgtgtgtggttatttttccccagtttgtcttttgtcatttgactttgcatatggtaggcttccgtcattaaaaacattaaaaattgttatataatttatgtttttagtctttttccttttagtctttttcctaggttttgtgtcttatttagaaaagtcatactttacacagttatttttaaactccaggctgattcctagtacttaaaacaattagatatttgctctacctggactgtaccttggtgtgagctatgagatggattcagcttgttattttcacacagctacacagttatctaacacaatctcttgaacaatccatctttttcccctttaatttgaaaaactaccttgatcacacggtaaaattccaagatgtctatttctgggtttcttttcttttctttttctttttttttttttgtcttttctagggctacacccgcggcacatggaggttcccaggctaggggtcgaattggagctgcagctgccagcctatgccagagccatagcaacatgggatccaagccgcgtctgtgacctacaccacagctcatggcaatgccggatccttaacccactgagcaaggccagggaccgaacccgcaacctcatggttcctagtcggattagttcgttaaccactgcgccatgacaagaatgcctaggtatctaatttgattccactgacatagctcttcgtggtccaataccattctatttttataattattacttattaaaatgtcataaatcattagatttttttcaaaataaattcaaccgtacaataagttaaacgtaatgaagcagtattaaaagcgtattctagcatttttttcctccaaaaaagcttgttggagttctctggtggcctagtggactaaggatccagtgttgtcactgctgtggcttgggtcactgctgtggcacaggttccatccaaggcctggaaacttccactctgcgggcacaaccaaaaaaaaaaaaaaagcttgttaacaggactcctattggagtttttatttcatcgagtctcctcctccatctcagaggggagcccttctgcatctcacccaatagtctccagggacccaccatggagccccagggacaagggtcttacctggtccagggtcatataacttgggcatgacaggatagcggatggtcactggaaacttggccactgaggacttggactccagactcactggagggagaaatcaggtcagggctggtgcacggtatctgggtcactccccacaaggccggggaagcccacgcgatgggggagtgaaggactgaggaccccacagagtctatggcattctggctcctaccctgctgtgtgttccggaagcaacctgctgaccgcctctgaaacgcacatgtctgcccccgtgagactctgtcgggtgaagtgggcttggaatcagaggggtagattaagtttgactctgcatctataatttgaaataccttgggtaagtcacatcacctccacctccacctccaaaaccagggtaacactaccagcccagttcacctcacagtgccttttttgttttttttttttttgaagggctgcaggtgcagcatatggaggttcccaggctaggggtcaaatcagagctgtagctgccggcctacaccacagccacagccacagccacatgggatccgagccacgtctacaacctacaccagtgcctggcaacaccagatacttaactcacgagtgaggccagggattgaacctgcatcgtcatggatcccagtcaggctcgtttctgctgagccacaatgggaagccccttcatagggtcattctgtggtaagacatgtttaaaaatcccaaggtacagagaactctctctctagcttatgctcatggaaaatctgcctcacattcactggggtcctgggaaagcctcctgtgtatctggtcaaagcagaaaaaggtaaatgtcttttttttttttttttttttctttttacggctgcacctgctgcatatggaagttcccggactagggctcaaattggagctgcagctgccggcctacgccacagccacagccacagccaatggaatcccagccacatctgcgaattatgccgcagcgaggcctgggagcaaacctgcatcctcatggattctagttaggttcttaatccactgagccacaagaactccggaaaagggtaatttatttatgtatgtatttatttatttttgtctttttctttttagggctgcacccgtggcatatggaggttcccaggctaggagtccagctggagctatagccaccagactacaccacagccacagcagctcagaatctgagccacttctgcagcctacaccacggctcacgcaatgccggacccttaacgccctgagcaaggccatggatcaaacccgtgtcctcatggatactagttgggttcgttaaccactgagccacaatgggaactcccggaaaagggttttaattcatccagaaagtaagtggggctgccctgagggtggcaggaattggtctcccatgaattctgggagtaagagtcgggtttgggatgggaggggaggaggaagacaaagccactgcccttgggactgacagctcccccacatccctctttcccgtaatgctcaggacaagccactgacacgtggactgtgttctcctctactgcagctgaaaccttcagctttttctttttcttttctttcctttgctttttagggccgcacccgcagcatatggaagttcccaggctaggaatcgaataggagccgcagctgccagcctacaccacagccacagcaacgcaggatgggatctgagccacgtctgcgacctacaccacagctcacggcaacgccggatccccgacccaccggtgaggccagggatcgaaccgccaacctcgtgaatactggtcagattcatttccactgcaccacaaccggaacagggaaccttcagctttgatcactgatgagaacgggagcagaaggggatggtttccaggtgcagagcatgaatgatctgtcctcatgtacagacaagcaggcatttcactgtctttctttcgggtccctccacgggctcaatggcaacacggggatagtaccaggtacactaagtgggaaattagaaacaggagccagggaagcaggcttcctggagaaggaagaccttgagagccgggggcgggggcagtggtggtgtttatggggtccctcagcattttgccatccgaggacggactcacccacatccactctgtggaggtggtactctgtgctcgtgtatgtcacatgctggaggatgaaattcaaaagctcccggctactggtcaaaatgttcagctgcttctggcctctgcccttcaccacattgtctgggacgtcagcaagggtgttcagtgtccccagagaagctgtcagggtgacctaggataaaggaggtagaaagcctaaatgcagagaggcacatacccaggatggccagcagggggcagcatgcataagggtgtgaggagaagaacgcttcatgctcccgaaagctagggtctggcctctgatggagtgtctgccccagccccaaaagcctaggacctaggacctggtgtgttcaagggccatttctgaaacattcttaactcttggcatgcagagttaagtggcatccattcttaaagatttcttctggagttcctgttgtggctcagtgataacgaatccgactaggaaccatgaggttgcaggttcgatccctggccttgctcagtggattaaggacccagtgttgcttcgagctgtggtgtaggttgtagatgcggcttggatccggtgtggctgtggctctggcgtaggctggcagctacagctctgattggacccctagcctgggaaactccatgtgccgctggatgcggccctaaaaagacaaaagacaaaaaaaaagaaagaaagaaagaaagaaaaagaaaactgctgaaaacatttcagtcaacagatcttttcttttcttttctttctttttagggccagacctgaagcacatggaagttcccaggctaggggtccaatcagagctacagcatctttgtctgccccatctttgtctctctgtcaaacgctgagaccagccaccatctcagggaaaagcgcatgggcagtgagccaaggacaggatgctaagtgcaaagtggggctgggaaggggactcttgcctcatagatgggagcatcaggtccttcaaaccggaggcctggaggtcacaggaaaaaggagaaaggaaaaaaaaaaaaaaaaacatttgagaggatgccaagagttccctgatgctctcagctccctggccaattcctacacatccctccagagccccttcaagtgtcacctatccagggtgtttgcagaccgctcgcctccccactagagcttgctagatggtgtccaacggacctctgcaaactccagcaaaccaaagcctctgatgccctcccctagtttgggttttttttttttttttttttgtcttgttgttgttgggttttgggggggggttgggggctttttagggccacaccctctgcataaggaagttcccaggccacgggttgaatcagagctgcagctgctggcctacgtcacaatgacagcaatacagattgtcagctgagtctgcgacctacaccacagctcacagcaacaccggatccctgccccactgagcgaggccagggatacaacccaaaacctcatggtgcctagttggatttgtttccactgcaccaccacaggaacccctaaatggtaaactttatgttacatatattttacacactagaaagagaattatccaaaatggcaaatcattttttaaatgagtacttaaaaacacgagcaactcagagttcctgtcatggcgcagtggaaacgaatccaactaagaaccatgaggttgtgggttcgatccctggcctcactcaatgggtaaaggatccagcattgctgtgcgctgtggtgtaggtcgcagacgcagctcggatctggtgttgctggggctctgctgtaggccagcagctacaactccgatttgacccctagcctgggaacctccaggtgctaaaaagacaaacgacaaaaacaaaaaacaaaaaacagaacaaaacaaaaaaaacccaaaacaccagcaactcatctcaaatgtttttactttaaaatctatctctgttcttatgactaatgcaaattctcactcaaacacatcctccttctgtggcctaaacttatttgggaaattggcaaaataacatttacctcacagggatgtatgctggacgagaggtgtgtgtaaaaaccactcgtggaggagctgtaacggatagaaatattctttccatatgcagtccctggagatgggctgaggctttgcttgctcccttgatgctggcagacaccaaaaagccaataatggcctaagattcctcgaggcacccagatctccgtcctctcctatacgatccaagatgcccagggaggcaacagctcctaagtgccattcccagtggtggaaacagtgagaataacatcaaatgaaaccatgtccagcttcatggattgtgctgggtatccgggaaggattcagcggataactgctcccttctgctcccttctttgcttcagaaggactacgagagctgcctgggtcctgtccgggtggagatgcacctacctgggatggggatggtgtgtagaggcatcacttccaccccgtggaccgggtacccaaaggggaggttgggctgagccagcaggggcggtgggcgagggagcccttctctgcagggaaacaaaaccatcagcagctgccttgatacctgtccctgactagctcttttttgggggggaggggggtgcaaccacacccacggcatagacgttcccaggccagggatctcacccaccccacggcagcgacctgagccaatgcagtgaccatgccagatcctccttaacgtgctgagccacaagggaacttccactgctcccactggtttgttcttttttttttctttcgtttttggccttcccaggccagggatcagacctgagctgtggctgcgacctaagctgcagctgcagcaaaagatctttaacccactgtgctaggccaggggttgaacctgcatccccgtgctccccagacacagctgattccactgtaccacagcaggagctcctcactgtcgccactggctagttctttttctttttttctttctttttttttgcttttttagagccacttcccgcggcatatggaggttcccaggctaggggtccaatcagagctgtagctgccggcctacgccacagccacagcaacgcgggatttgagccgcgtctgcgacccacaccacggctcacagcaatgctggatcctgaacccactgagcaaggccagggatcgaacccacatcctcatggatactagtcaggtttgttaaccactgagccacgacaggaactgctggctagctcttaaaggggtatctgtgcccagagctttgggctgcaaagggggagaaatccaaagtaaatcgtcggattgtcatgcattctctcctcttctttattcctgctcctccctccagcctcgaattccacaaagaaactgaggcagattacaacaacacacattaaaaataaaaatcacggagttccttttgtggctcagccggttaagaatccaatgcagcattcttgaagttgcgggttcaatccctggcctcgctcagagggttaaggatccagcgttgccctgagctgtggtgtaggtcgcagacgcggctcggatcccacatggctgtggctgtggctgtggggtaggctggcttctgtagctccgattggacccctagcctgggaacctccatgtgcctcgggtgtggccctaaaaagtaaataaataaataaaatgaaacataacataaagagaacaaaggtaacacctgctcacactcaccacgttcgaattattttaatacattttcaattgctggttttcaatgtgagccattttaaataaatctttacatgcaatattaaaaaatattaaaatattatctctactcttgaggttatttgcatcaatctccctgtggatggagatattatataaccggcatgcaatgatatctcgtgggagacttgaaatcagccacagtgtgatttcttgtagggttgagtttttttttaatttttgaactttttactaaagcagggttgatttacaatgttgtgtacagtgtgattattaaaccgtggaaattggcaaacactacaagccactaccaaaagcccatggttaaatattaccaccactattcatatttctccctcaacgtataaacacatctacccacacttatacacacaactatcccctcctcttttaaaaacacaaatgtggagttcccattgtggcagagtggaaatgaatctgactaggatccatgaggatgcagattcgatccctggcctcactcagtggggtaaggatccagcgttaccgtgagctgtggcgtaggtcgcagacgcggctcagatctggcattgctgtggctctggcgtaggcaagagtctacagctccaatcagactcctagcctgggaacctccatgtgccatgggaagtggccctagaaaaggcaaaataccaaaaaaaaaaaaaaaaaaaaaaaaaaaagagggcattccctcccccctccttggagccacaccctcgggaatgagtagagagcttccgctccatctcagggcgcaagagccctcagcatctgcaatacctcctctgaaagtgttcgagctcagcctgtctcctcaggttcactgcggggaggtcttgcgggtcgtaggcatcctccaagttatagctttcctgatgcccgaaggcgtcacattggcactggtttttcgggaacagcctaaaataagacaaggtcaaagatcacagattgggaaagtgggctggtaggtgagggggagccgcaagctcggtccggtgtattttttttttttttttaactttttattttctctttttttgtctttttagggccgcaaggttccgaggctggggtctcatcggagccgtagccaccggcctacgccagagccacagcaacgcaggatccgagccgcatctgcgacctacaccacagctcatagcaatgcttgatccttaacccactgggcaaggtcagggatcgaaccctcaacctcatggttcctattcggattcatctccgcggagccatgatgggaactcccaatccagtgtgtttttccccctaggctttcccatacctagcgccagggttgggttgagaccctggaatcacagcagcggccgctcccaaagacacagggaaggaagggaagagaggaaggaaggagggcgagaaggccccctctctggaatcaaagtcctttatttattattattattattatttgctttgtagggctgcacccgcagcatatgcaggttcccaggctaggggtccaatcggagctacagctgccaacctacaccacagccacagcaagatcagatccaagcggcgtctgggacctacaccacagttcacggcaaccccgatccttaacccatggagcgaggccagggatcaaacccacaacctcatgcttcctagccagattcgtttctgcagcgacatgacaggaactccccaaactcctttaaacttgagagtcacaggaatctcagaggcattgcagccccacccaccagatgaaaaggccagagggccagaaaggccacatctttcctataattttgtttagttttgggggttttaatgtgtttttgttttttagggccacatctgcagcatatggaagttctcaggctagcggtggaatcggagctacagctgccggcctacaccacagccacagaaacatgggatctgagctgcgtcttcaatctacaccacagctcaccgcaaccctggatccccgactcactgagcgaagccaaggatcaaatctgcgcatcctcatggatcctagttgggtttgtcaccactgagccacaacgggaactcctcctacagttttggttaaataggccctccaaagtcctaaagaactttgctgggtgctatagaggctatgcccagcagaccaagcccctttctagtcccgccgtttgcagtcaaatgctctacccctgagccatactcccaccaggtcccgcagtcaggattcacattcccaatcagcacaggtgcagaaaggtagggaactggctgtaaagtgggcataagaggacacagtaggagttcccgtcgtggcgcagtggttaaccaatccgactaggaaccatgaggttgagggttcgatccctggccttgctcagtgggttaaggagccagtgttgctgcgagctgtggtgtaggttgcagatgtggctcggatcctgcgttgctgtggctctggcgtaggccggtggctacagctccgatgggacccctagcctgggaacctccatatgctgcgagaagggcccaagaaatagcaaaaagacaaaaaaaaaaaaaaaaaaagaaaaaagggcacagtaaagccacaggaggagccagggaagtgtcagtgcaaagtggtattcttgccatctcacccgttttcaccgtagaaatcgggtttctcaggtagaagcttcagcgtctgcgcatccagggtgggggacgggatgggtgagttgaggagactgaagtctgtatcgaggaacacgctttggaacataaagagtccaacgctcaggaccaaaagcaccatcaatatcttgaggatcgacagacatctagggctgttgggacacaagagagcaaacgctgttaaaatcttttctgagtatgttaaaaaagatttcattgtgcgacatagatgggaatagcaacttgagcaaaaatgcaagtcaaacctgttttgtacactacgtatcaaaattgatttcttcccaaggcaaaagagaaagaaaagcaaaaataaacctaagcaaactgacaagcttttgcacagcaaaggaaaccataaaataacccaaaaagatcctgctgggatccactgggaacgatgtctggtcacttgcgatggagcatgatcatgtgagaaaaaagaatgtatacatgtgtgtgtgactgggtcaccttgctgtgcagtagaaaattgacagaacactgcaaaccagctataatgggaatgataaaaatcatttaaaaaactgatttcagataaatagaaaagtaaagaatcaaatctgcagagagttccctggtggctcattgggttaaggatctggtgtggtcactgctgtggctctggtcaccaccgcggcatgacctccatccctagcccaggaacttctgcatacgtgggcatggccaaaaaactatactcagtggaaaatgtgaagtttttcaaatacgcacttctgatcacaagacctaaaattaataaatgaagcaataaaataagagatttgaaaatggacaacaaaatgaacctacgaaaagcagaaacaagattttagagatagccaaatagaaagtggtgaatttaaaaaaaaaaaaactaaaatggaatcatcgttaaatctaagcacagagtagacaactggttttttcttttatttttttaaaattttatggccacagccatggcctgtggaagttcccaggccaaggactgaatccaatccatagcttcaacctacacctttaaccaccgcactgggcccagggatcaaacctgcacctctccagtgacctgagccactgcagtcggattcttaacccactgtgccagggtgggaattccagacaactttataacctccttgctctaagactttcctcctgacccagaagtgacacctacaaacgagtctggttatatcacatgacgctcccctggtcctggctgagtaagcggatgttcacctcatccgaatggggctaatcagccagaatttccttcccagaaatggggaaccagagatattgttcggctaatcctaatcccctgaactgagaatagaggggaggaaagaagagagagaagacagaaggtgagagaaacaaaagaagcctagaaggacttcccattgtggctcagtgggttaagaccatgaccagtgtccctaaggatgcaggttcaatccccacccttgctctggcattgccacaaactggtggcagatgcggcttggatctggcgttgctgtgcctggggcataggctggcatctgtggatccaattcgacccctagcctgggaacttccatgtgacacaggtgcggccctaaaaaaaaatcgtttttaatttaaaattttgggggcagtgtctttaaggcattagtctgctatggctccctttgcctgacaaagcaataaagctatctttttctccttcacctgctcctccccccaaaaaagagttcccattgtgccgcagcagaaacgaatacaactagtaaccatgaggtttcacgttcgatccctggccttgctgggtgggttatggatccagcattgccatgagctgtggtgtaggttgcagatgtggctcggatcctgcattgctgtggctgtggtgtaggcctagccttggaacctccgtataccatgggtatggcactaaaagccaaaaaaaaaaaaaaaaaaaaaaaaaaaaaatttaatttaatttttaaaattaaaaaatttttaatttagtttttttaacttaaaaaaatttttttaaatagagaagcctagatcctgaatacctagatgaaagggatgactttctacaaaaacgcaaatgaataatgtattggggaaataaaataaacaaataaacaaataaataaaagaattcccactgaagcaccgcccccccaaaaaaaaacccacaaaagacttaaacagacctgtaaaaatttaaaaaaaaaaatcaaggagttcctttcatgcctcaggggttaatgaattcaactatgaaccatgaggtttcgggttcaatccctggccttgctcagtgggttagggatccagcgttgccgtgagctgtggctctggcgtaggctgacagctgtagctccaattagacccctagcctgggaacatccatatgccactggttcgaccctacaaaagcccaaaaaaaaaaaaaaaaaaaaaaaatccaggaatttatcaaaggtctatgtacttttcaaagtcccaaatccacacttcacaagtaactccagactggtttgtaagaaaccagctttgcagtgatgcaaatataggtactgaccaataacgatgtaaatacgccaaacaaatattaaccagtgggacacaacagtatcttaaatgaatgagtcaccgttaacgaatgctgttcttggagttcccgtcatggctcagcagatacgaatctgactagtatccatgaggacacaggctccatccctggccttgctcagtgggtcagggctctggaattgctgtggctgtggtgtaggtcacagacgtggctcagatcccgcattgctgtggctgtggtgtaggccggcagctgtagctccgattccacccctagcctgggaacctccatgtgccgcaggtgcggccctaaaaagacaaaaacaaaagcatgttccttctaggagagcaaggataactcagtgccactgtggggcaaaaccacaccgacgccatgctgtcagctcatcttaggcccacagtctcatctgctccccctccttattaaaaaaaaaaaaaaaaaaaaagaatgatcacatcctaagttcctaacacaattttcagactatcagatagaaacaaatcactgacaacctgggtggggggcagcatttgggggaagtgagtgtggtcttggcctttttgagggttgggtttgtttccttttgctattaggtactaaaacttaaaattgcatcacttagtgaaaacagaacaaaaatagggtcggactttctctgtggctcaacaggttaaagacccagtgttgtcactgcagtggccctggtcgttgctgtgccatgggttccattcctggcctgagaacttctgtatgcctcgggcgtggccaaaaaaaacccaaacaaaaacaaaaacagaaacatgagttcctgtcgtggcgcagtggttaacgaatccaactaggaaccatgaggttgtaggttcgatccctagcctcgctcagtgagttaagggtctagcgttgccatgagctgtggtgtaggtcacagacacagctcagatctggccttgctgtggctctgccgtaggccagtggccacagctctgtttcaacacctaacctgggaacctccatgtgcggtgcattcagccttaaagagaaaagaaaaaaacaaacaaacaaacaaaaaaaaacaatagtgaggaaaagtggcatcattttacctttttgcctatttaatgtttagcttaatagataaaatgaaccatctgttaggacaggttgtttcgctgaagaatatgaagaaaatacaaccccacacaggtatgtcaccagaaaagggagaaacactttaattgctttttcaatattgtagatatttatctttgatactacaccaaaaatcaagaagttagtagcaggttattgttttgttttgttttgcctgtggcatgcattagctcgatgtgggattttttttttttttttttggctttttttttggccttttgccatttctagggctgctcccagggcatatggaggttcctaggctaggggtccaattggagctgtagccaccagcctatgccagagccacaggaaacggggggagttgagccaggtctgctcaccttacgccacagctcacagtaatgctggatccttaatccatctgacccaggccagggatcgaaccctcaacctcatggctcctagtcaaattcattaacctctgagccacgacgggaactcctcaatgtgggatttcagttcccagtccagagactgaacctaggccacagaggaaaaaagcgtgaacctgaacccttagtagctagggaacttccaagaagtggtactttcttaaaaagttagttaagtgtggactctgaaaccatatcagtgaaaaaaaaatttttttgctttttttttttaggaccccacctggtgcatatggaagttcccaggctaggggtggaatgagagctacagctgctggcctacaccacagccatagcaacgccggatcctaaacccaccaagcaagggaacaaatagagggagtttccactgcgcacaatgggatcggtggcatcactgcagcgccagggacacaggtttgatccctgacagcataggttgcaactgtggctcagatctgatccctggcccaggaactccatatgccactggcacggcccctccaccctgccaaaaagagtttggaggcgttccctggtggttcagtggttatggatctacactctcaccactgtggcccaggttcaatccctggtctgggaactgagatcccacatcaagccgctgcacaccttgcccaaaaaacagggttttttaacctttttttttttaaactgttattccccaatgcgatttttttcccctactgtacagtatggtgacccagttacacatacatgtacacattctgttttctcacattatcatgctccatcataagtgactagacagagtttctttccttttttctttttttctttattttttaattacttccccaatacaatttgttaaaagggttttttaatcctgataataaacacataaaatttagtaccttggagttcccgttgaggctcagcagaaacaaacctgactggtatccatgaggatgcaggttcaatccctggcctcactcagtgggttaacgatcccgcatttgccatgagctgcggtgtaggtcgcagatgcagctcaaatctggcattgctgtggctgtggtgtaggctggcagctatagctccgatttgacccctagcctgggaacctccatatgccataggtgtggccctcaataaaacaaagaaagaaagaaagaaagaaagaaggaaggaaggaaggaaggaaaggaaggaagaagggaaggaaaggaaggaaaggaagaaagaaaaaatttatcaccttaactacttctaagtgtacatatactttcataatgtagattgttcatgtcgttttagaacggatctccagaacttttttctgcttttttctttgcttatatttttgcatgcaactatttttatccattttttctgattatgaaatttttatcttttacccattgaagaaaaaaaaagttcctctttacaaaaacaaaacaaaacaaaacaaatatatgtaggagaaatgatagaattagaaaaatcaccactttgctaccaacaatgtaataaatgattctggccaggattgtccatcttttttttttttttttcctcgtttttttgcaatttcttgggccactcctgcggcatatggaggttccaaggccaggggtccaatccgagctgtagccgccagcctatgccagagccacagcaacgagggatccaagccgcgtctgcaacctacaccacagctcatggcaacgccggatcgttaacccactgagcaaggccagggatcgaacctacaacctcatggttcctagttggattcgttaaccactgagccacaatgggaactccaggattgtccatctgttctaaaacatttgccaggtgcaggattttgttttgttttgttctgctttttgtgtttttcttcttctttttcttttttctttttctttttttttttttcttttttgtctttttagtgctgcacccacagcatatggaagttcccaggctaggggtctaaccacagctgcagctgccagcctacgccacaacagcaacagcaacgttggatccaagctgtgcctccaacctacaccccagctcacggcaatgccagatccttaacccgctgagcgaggccagggatcaagcctgcatcatcatggatactagtcgggttcattagccactgagccacgacaggaactcctggaggcaggatattgaatggtgccattccggagaacacttactacttacaaagagataaaaacacatctttgcaatgaaaggatcatgcatcactaccttaaccacatggtcaaataaacatccctaatagtgaggcagcctgaccaactgtcctccggatatgatgataggaagcacacagatcatttaaaggagtattactgccaaaatatttaaccgaaatgtaatcaaggatcagagacctcactgccaatttataggaaaaaacaggggataaaaatttagtaacaccatcaagaacaatagacaaatcagggacatcagaatgttttctgcaagacaacaggcctgaactcttgacaaaggaaaaaaagtgggagttcccgctatggcacagtgggttaggaatcggactacagcagctcggggcattgtggaggtgcgggtttgatccctggcccgctatagtgggttaaaggatctggcgctgtcaaagctgcggccattaaaaaaaaaaaaaaaaagaaaagaaaaaagaaaaagcaattgaaaaaaataaaaagaatgagagtgaatgagtaacatttctagtaaagggttgcctgtatcttgtgcagaacatacagaatacatctttcaatgattttagtcaatttttttgcattttaagaaatttctttttttttaattgtggtatagttaatttacaatgttgtgtgaatttcaagtacacagcaatgtgattcaattacatatatacatatatacacatacatatcctttgcagattcttttctattataggttgttacaacattttttttttctttttaaggctgcatgtgtggcatatggaagtttccagactaggggtcgaactggagctatagctgcccgcctacaccacggccactgccacagcaacacggtttccgagccatgtctgcaacctacaccacagctcacagcacgctggatccttgacccactgggcgaggccagggatccaacctacaccctcatggatactagtcagattcctttctgctgcaccacacaggaactccctattataagatattgagaatagctgtcctgtggcacagtgggtaaaggatctggtgttgtcactgtagtggctcaggttgctgctgttgcacaagtatgatccctggcccaggaacgcttgggatggcattaataggaattgtttggtaggagatttttaataaaatgttcaaccgcccaatttttaatagataactacaaatgttctccactgttaaaactgcactttatgtacttaagtggggatgttaaaattatatgggtccgcccgctattatagttgaaccacatttgagacacattcaaaaaagggtaaaaatcgggagttcccactgcagctgcgggttcaatccctggcctcactcagtgggttaaggttccggcattgccatgagcggtggtgtaggtcgcagtcgcggctcaaatctcgtgttgctgtggctgtggcataggctggcagctacagctctgattggacccctagcctgggaacctccatatgccgcaggtgtggccctagaaaagacacacacacaaaaaaaaggttatgttgaagttcccgttgtggctcagcagtaacaaaccggactagtatccgtgaggacacgggtttgatccctggccttgctcagtgggttaaggacccagtgttgccacaagctgtggttgcagtgcaggtcacagacaaagcttagatctgacattgctgtggctgtgacacaggccagcagctacagctcaaattcgacccctagcctaggaacatccacccacagggggcggccctaaaaaaaaaaatatatatatatatatgtgtgtgtatatatatatatatatatattttatatataaaacattttatatatatatataaaatatatatatataaaaatatatatatatataacattttatatatatatataaaatgttaacattgagtaggtttaaggttattattttaataactttataaataaaaattttagattttctcagctttaatttttaattaggtgtggagttcccactgtggagcaacaggatcagcagcatctctgaagcgcagggatgcaggtttgatctccagtcctgcacagtgggtcaaagatccagcattgccacaactggggcataagtctcaactggggctcagctctgatcactggcccaggaactccatatgcatcggggcagccaaaaaagaagaaaaaaaaagtgtctaatatggtaataggaatagatacaacccatgtaaacaaaagttttttggggtcttcaataatttcgaagagtgtaaggggtcctgagaccaaaaagatcaagaacggctggtctacgttctaagcaactgctgtggttcttgttaagttttaatactgaagatgagtttttacaaggacaaacaatataatacagggcatgtagccaatatttcgtaataactataaatggaatatagcctttaaaaaggccaatcattctgtggcaccctgaaatttatatgatacatgaactgtacctcaataaaaaaatttaataagataataataatataggtgagcttcaattagcacattctattacttatctttaataaaaattatattctgtgtgcaaggtaatctgacaaactcaccagtacaactggtttccaacatagacctggctcagctgcagaggttcctttcaagagtaaacttgcagggctttccccgctgtggcacagcagaaatgaatcagactagcatccatgaggattcagggcacagaaacagctcagatttagtgttgctgtggctgtggccatggtgtaggccagcagctgcagctccaattcgacccctagcctgggaacttccatatgctgatgtaggagaaaatgtcccaataaaatgtagaaaggagagaccccggccatgacgactaagcaaagtctagccaactgccccaaccagtcctcccccatgcatctgcttctgtaaatttgtttccgcatctactaccttgcctgacgtcactccagtccaactagccaagcttggacctggaagacgtagcccataaaagccttgtgaaacccttcttccgggctcagactctggagagtgatctcgtctgagcccgccggcgtaataaacctgagttctccaactctccaagtgctcgcttggtttctcgccgggtaaaagagctgctccactatggccacagagctactggagctggtacgctacagccacggggctgtcgccagagctgatacgctgcagcgcagggctgctgggtatctgctgtaacatttctggaggccccagcgagattccaacctttctggccccttgagccactggaacagaggtaaggccgcccgggagccggggagcctcaaaccgaacgaggcggcgcaccacccgacggtattctgggtcctccttcgtcagcggcattcctgattcccgggtgaccaaaccctgaccagactcagtggagagatggaccaactcaccagaaaggtatccggacaaggtaaggcagcggggccaaccccagtcaggtcctgccccagtgggcagaagaggggactgatcaccccctgagggagactctcccggtcagaagctgtgcctgactggagcagcagtcctagtgctccagattggaagcagaggaacctcttgcttgggtggagcaactgtcaggtgtagccaattgaaagttgtgcttgatcgagctactagttagggactcccagggagtgggaggcattgtgataacctctgagtgtgtgtgagagtgaatgagcggcctgattcgcttgtgcttcaggttcgagtttgtggctccacggtcttagtggctatggagtctgagtgggtcctaacctgcagttccgtggtgacctcatagggcttatggctgcagcagactctgagggttctgttccctccctgcaagtccaatccaagttcggggattatacgaaccagccaattgctaagaggcacctaaactcccgagaggggggcagtcaggcggacatctgaatggccaccttctgagaaggaggcaccctcccttgttttgtctgcgacactggcacagggcgtccacatggggtgggacctaacccagaagcccacgagccagagacccctgtgcttccgccattttgggccataaattcctccaaggagatgacctaatttgatcttgcccctgggcctccaggaactcccggcccagattctaaaccagccatgggactgcctattttgtcagttcatggaggcccaggatctgagtcagggagacaagcctgtcatccctggctcagttcagggtatagggaggattgggtacaaggtcccctgtcctttgcccaaaacattagaacttgtctgagagtgccttcctgagaccgggggtccagatggattggagatacttgcaataaagcaggtgctcttcccagtcatagagcaagctgagtgggatctgtcttgctttcaagagtggtggaggcaaagctactggggataccacccacgaggccagaaaaggtctcataatatcaggccatagaaaagatccacataaagacaccatgggttcacccaagtctaaacctgtggttgtagactgtgtgatcaaagatttcaaaaagggattttctgaagattatggtataaaactaacctgatctttcatcatttcctttgccattacctcaaatagagctgtgggggcaaaggaaacagacctctagatgttaagaccatcctgagttgttaccaggcctgtgggggaaaaggagttcatagctagtattcatccaacttaggccaagtgtttagcctcagagcctcggcatagtcagttttgctttttgctgtttactttcatcctggttggagtaattgatggctggttcatccaatttacctgttaactgtggtttagaaactttcctaatgttaatacagggcatgtcagagtgagcatcttaggatttgaaaactcagggcagggcctgtatgcctgggttttcttcacctctgtccagagacaggcactgggcagggatgacgggaagagaggctacgctggtaaggagtggttaattccagtcagcctgaggtcggatgggacatttgaccactagtgtctagctgctccatataagagaggggacaccctcacatagccaagaaaggacaataggcgctggatgctgttttttgtctttttcggatgggagccacatcctcaagcctgctgcatgactcaatagcaacccctctgacatgtgccttgaagaactggaaaaagtttgaccctgagattctgaaaaagaaacatttaattttctttcgaacaaaagcctggccgttatataatctgtcagatggagagtgacagccatctgaaggctcactagcttataataccattctccaattagccagaagttagtcagccttctccaatactgctcaaggctccttctccccgcaagccagtgccaaagttatatctctctctactccctttacaagaagtagcaaacagagaatggaggccaaatacaggtctatatacctatttcacttcaggacttagggcaaataaaaacagatttgggaaaatttgctgatgacccagatatattgaggttttcagggtctcatgcagtcctttgagttagccttcaaggacgtcatgttattacggaaacagacattgactataagtggaaaattacataaagtctccaaaactgctcaaagctggggaagatgaatggaatgatgctaaaaatgccagaggcagattagaagaggaatgatcaagattccccacagggtgtcaggcagttcctatgagcgatcccaattggtctgctgatgagggagataacaacaattggcatagaaatcattttattacttgtatagttaagggattaaaagcccgttaaaactatcggaggtttactaggggaacaagagtccatcagctttcttaaaaaggctcagaaaggcattgagaaaacataaaacagggaacccagaaacaatggagggccaaataattatttatttatttatttattgtctttttgctatttctttggccgctcccgtggcatatggaggttcccaggctaggggtctaatcagagctgtggccaccagcctacaccagagccacagcaatgcaggatccgagccgagtctgcaatctacaccacagctcacggcaatgccggatcgttaacccactgagcaagggcagggatcgaaccctcaacctcatggttcctagtcggattcgttaaccactgcgccatgacgggaactcccgaataattcttaaggataaattcatagctcaattggtgccagatatatggagaaagctccaaaaattggcttttggccctgatcaggacctggagcacctcctcagagtagcaactcaagtatgttataatctgggccaggaagaataaaaggagaatgagaggagagacagagaaaaggctgaggctctagttatggcactacagggagtcaacctggaagttgccaaggtgagaggactagggcagagacctatgcctgcagcctgtttcctctgtggaaaagagggaccctttaaatgggaatgccccaagcctcagaccacagcacctaggccatgccccatatgttggggagatcactggaagagggactgcccctgaagatgaaggtctctggggttgacccctcaggcccaggatcaaggctgacaggacatttccataatggctcctgtccttctcaccactcaggagtcctgggtgactctaaatgtaggaagacagcctattgacttcctcctgaatacgggagccacttttcagtcctcctctccaatcctgggcccctccctcatgaatctgccacatttatatttccggcaagccggttacaaaatttcttacacagcctttgagttgtggctgggaatccattttcttctctcatgcctttctgattgttccagagagtccaactcctcttttagaaagagatattttgtaagaggttaaagcctcaattcacatggcaatggagcctaatcaaggtttatgcctgccttggatggaagtatatactgacccagaagtctgggccataggaggaaacataggaagagaaaagaatactcaactggtggaaataggtcttaaagactggaatttatttctttgccaaaagcagtatcctctgagacccaaggcatgacagggacttgtatcaattataggaagcgtaagagaacagattattaattgactgtatcagcccttgtaacactcctatattgggagtgcaaaaacttaacagggattggttcctagtacaagacctccatctaataaatgagacactggtctcattacatccagtggtgcccaatctctacactcttctttcacaaattccagaaacagcagcatgggttactgtatcatatttaaaagatgcctttattctgcatttccttgactaaggctttgcatatataaattctcaaaatatggaaggtaactaactgaccagaattaattttaggttcaagtcaactgggaaatattcagtattaaattaatatcttaaattagaattgaagtttgctgatctaattaatacacacatgtcgttacagctgtcaacattaggtataatatcttatcgtacctaggtttaacagaagtcaaatgagacactgagacatcagttactaaacagaaactaaaggtatttagaataattaatcaatatgatcagtttcaccctgaatggtctccataagaaaaacatgtgtttttagaaattataaaggacagtctgtggttgctttagaaacgtagaatctgtgtgctttcaatatagaaggaatgagggatggaactgcattttatgaaggcaaaagaaagtctgtcttcagctgattgctctggttggaaaataagggacagactaatatggatacagaaagtgatacaaggtgtgtgggaagtggacactgagaattttgtgcatggtggggactgtctatatttgagtaagttaactttaaaagtaatgtggtgccataaatcatactgctcacaaggacataaggtagctttcaattacatgttgaccaaggcatacaagtgtttcataaccagccagagaaatcagaaaaatcatacaagttacctgtgctattataaaatctaaatgttgtattcttgatggttcacagaatgtgtctaattccctgctagatcttcaacagtagattcatgagcggtcctatccagctccagcttttggagctgccctgtggaaccagccgacctcctcctcctggtgaaaatatttcttcaccatatctttttattcagaccctgtataattaactgtatttcttgcttcattacatcctgattaaaagccatcagccttaaaatgttgatagaaggggtacccaaagcaatgtatcaaagcccacttgaccgtcccatgagtggagacctaactgctttccctaatgacgccccttttcagcaggaagaagtcagagcggtcatcgccccctttccccacagttagagtctctaactcactggtgggattgaggcagaatattcactcaggtagtcagtgtaggaacatgggcttcgatacattctttgatgtggctattggttaacatttgtaaagtaagggttgcacagcaaccccaactgctataaaggttacaggtattaccccatggatccatcacaccggaataaagaaggctgctcccgccattgacacagacacctgggaagctgtccggcaccctgagaacccccctcaggatcaagttccagagacatatggcactggaggatggcaggccctgctctggtcacacccagaagctggccagtctatgcacggcagaaacttgaggagtctacagccctgccccagccacatactggagttggttggtttgtacaagtggaggccagaggatctctatgcaaacttgaattgaactcatgctctggtggggaatattggtaattgaaattgccatagccctcatatttggagtggggctatatgcagtatccccttcagaatggggacagggagcccagctactcatctgtgtgatgtatctcctgactgtcagtatactagaatccctgttcataatgggtcagtgaaaaggatcaaaggaatcatagttctgttaacactcaccctgctgctcactccaggggcaacagactgggacaatgatctatgggatgggacgggattaacagatgcttaccagtgcctccctgctaattggacagggacctgcactctagcctttgtcactcttcaaatagatattgtccctgggaatcagtctcttatggtgcccatagaggcacatggcagaacaagacagcaatgcaagttatccccttatttagttggtttgggaattccagcagggataggagcaggagtgggaggaatagaatcctccactgcttattatcatcaattatctaaagaattcacggatgatgtggaacaagtagccccttccctagtagccttacaggattaggtagactctctggcagaagtggcccttcaagacaggagagcactggacttattcactgctgaaaaaggggaactttgcctgatgaagaatgctgtctttatgccagcagatctggaatagtcagaaacatggcccaacaaataaaagaacgcatagcaaagagaagggaagacttagataactcctggttaaattggagcaactactggagttgggtggcatggctcacgctttggttgggcccctcctcatgctcttcatggccctcacatttggcccctgtatcctgaactgtcttgtcaagtttgtctcctcaggcctagaatctataaagctacaaacggtggtgatgtcccggccacacttatatcagcctctgggccaagaagaccagaaaggttgatgcttgctccaagaatgtgaaaaagcatcaagagggggggatgtaggagaaaatgtcccaataaaatgtggaaaggagagaccccggccatgacgactaagcaaagtctagccaactgccccaaccagtcctcccccatgcatctgcttctgtaaatttgtttccgcatctactaccttgcctgacgtcactccagtccaactacccaagcttggacctggaagacgtagcccataaaagccttgtgaaacccttcttccaggctcagactctggagagtgatctcatctgagcccgccggcgtaataaacctgagttctccaactctccaagtgcttgcttggtttctcgccgggtaaaagagctgctccactatggccacagagctactggagctggtacgctacagccacggggctgtcgccagagctgatacgctgcagcgcagggctgctgggtatctgctgtaacactgagggtgcagcccgaaatggtaaaaaaaaaaaagaaaagaaaaaaaaaatagtaaacttgcaaccacagtaagtatataacggagttcctgtcatggctcagcaggaaagaatccaagtaggaaccatgaggttgggggttcgatccctggcctcgctcagtgggttaagggtccagtgttgccgtgaactgtggtgtaggtcgcagacatggcttggatctgacattactgtggctgtggtgtaggtcagaggctacagtcccaattagacccctagcctgggaacctccatatgtcgcgggagcggccctaaaaggacaaaaagaccaaagggaaaaaaaaaagaatgtatatatatgtatgagtgagtcacttggctgtacagcataaattggcacaacactgtaaatcaactatactttaacttttcaaaaagattaaaaaagaagcattggcgttatcctcaagtacagctggattcccatctgctccttataatgctgcccttgggcaacctccattctccatgttcacagctctgaagtggacataactcttccaagagtgttgctgggcgcattagaggcacaatctagaacagggcctgtacgtaacagataagtgctccacagtggatgaaatgaaatgaattcaccaacaggaagtaacgatcatttcctgggttggtagggtgtgttgtagtgaaacatcctttctcagagggacaaagatcagaaatgcacatttcaaaatcagacactctttaatttaaaaaaaaaaaaagaaagaaagaaaagaaaacgaaaaaggcaaataaacatttaaaagagtaagtttcttctgaggaagaaacctgtttcccaaggtcacccaagccagcagccttaaaatcttagagacataaacacagcaacatggacttgccagaatgttcggttggcaccagtttggatcctggtatcaagactcctggtcattctcctcattcactaaggaatgtgggatgagataattttggggaagtgctggaaggaaagccttagaagggactttagctggtaacgcaagagctacctccctttgctgagttctgccatagcctcagtacaaacgtgtttcttggtttccttatttgtttcggcagcgccagggcatgaggaagttccccgggtggccaaggatcaaacccttgccacaggaggaaaaacgctggatccttaacctgctgcaccatcagagaactcgtatacttcattttaatcctcataaaacatcatctaaccaacacggttccccccctccccttttttaagccatttagggccgcaggtgcctgtgtatggaggttcccaggctggaggtctaattgaagctgtagccatcggcctacaccagagccacagcaacgcgggatccgagccacgtctgcgacctacaccacagctcacggtgacaccggatccttcacccactgagcaaggccagggatggaacttgcaacctcatagttcgtagtcggattcgttacccactgagccacgacgggaactcccacaagacgtatttctgatccttctttctgtttataaaaattaaatgagctcaccaagtccgcacttcctccgttaattattatgctactcagaagttttttttagcaccccaaaccacaaaacggacgctcgctccaccgcgaggctgtcttccggagcagaaaactgaccttttaaaatttttttttcttttggtctttttggggccgtaccctagggcatatgtaagttcccaggctaggaggtctaaccagaactgcagccgccggccttacgctgcaactagatgctacgccaggtccgagtgcgtctgcgacctacaccacagctcacagcaacatacccactgagcgaggcaagggatcgaacccgcgtcctcgtggatacggggggcggggaggggcgtaaaccgttgagctagaacaggaactcctagaaaaccgacttcttcaaaaactctgcctctaaaacccccaagctgttatttaatgcagcgtaaaggacgcagcctccgcttccccacagcctggggccccacagcctggggcccgcacatcccccgagacttacatccccagccctggtcataacctccgagttccgggccgccccccgtgctctgcgccacgagaggcaacctccacgtcgaatgttcccctggaaaaccagtgttccttggggcgcagggcgggggaacgagcaggaactctcaacagcgtcccgaggcgcagtctccttctcgctgtctcaccgacgtacggagccggtcggacttattttggagacccgccgccccccctactcggctccggggtcccgggacctggccgctcccgggtggcgccactggctggccaagtttgacttcccatttgtctctgctcgagggacacgcacctgtacgaagtcatccttaatcccgccgcctcgggacattctgggctggtggtgccactccgcggattggacagccctagcaccaaccccggcaaattcttcctggtaaaccgcgagagcttgggtcggacccgcccacgtcaccaccaacccccgc

SEQ ID NO: 24 - DNA, 2012 bp, Sus scrofa
tccgcggagtggcaccaccagcccagaatgttccgaggcggcgggattaaggatgacttcgtacagccctagatgtctgtcgatcctcaagatattgatggtgcttttggtcctgagcgttggactctttatgttccaaagcgtgttcctcgatacagacttcagtctcctcaactcacccatcccgtcccccaccctggatgcgcagacgctgaagcttctacctgagaaacccgatttctacggtgaaaacgggctgttcccgaaaaaccagtgccaatgtgacgccttcgggcatcaggaaagctataacttggaggatgcctacgacccgcaagacctccccgcagtgaacctgaggagacaggctgagctcgaacactttcagaggagagaagggctccctcgcccaccgcccctgctggctcagcccaacctcccctttgggtacccggtccacggggtggaagtgatgcctctacacaccatccccatcccaggcctccggtttgaaggacctgatgctcccatctatgaggtcaccctgacagcttctctggggacactgaacacccttgctgacgtcccagacaatgtggtgaagggcagaggccagaagcagctgaacattttgaccagtagccgggagcttttgaatttcatcctccagcatgtgacatacacgagcacagagtaccacctccacagagtggatgtggtgagtctggagtccaagtcctcagtggccaagtttccagtgaccatccgctatcctgtcatgcccaagttatatgaccctggaccagagaggaagctccgagacctggtgaccattgccaccaaaaccttcctccgtccccacaagctcatgaccatgctccggagtgttcgtgagtactacccagacctgacggtgatcgtggccgatgacagcaaggagcccctgaaaatcactgacagccacgtggagtattacaccatgccatttgggaagggctggtttgctggcaggaacctggccatatctcaggtcaccaccaaatatgtgctctgggtggacgatgacttcatcttcaacagcaagaccaggatcgaggcgctggtggacgtcctagagaaaacggaactggacgtggtaggtggcagcgtgattgaaaacacattccagttcaagctgttgctggagcaggggaagaatggcgactgtctccaccagcagccaggatttttccggcccgtggatggcttccccgactgcgtggtgaccagtggtgttgtcaacttcttcctggctcacacagagcgactccaaagaattggcttcgacccccggctgcagcgagtggctcactcagagttctttattgatgggctcgggagcctgctcgtggggtcctgcccacacgtgatcataggtcaccagccccatttaccagtgatggacccagagctggccaccctggaggggaactacaccagttatcgggccaacaccgaagcccagatcaaattcaagttggctctccactacttcaagaactatctccaatgtgtcacctaaggtatccgggcattggaaaagcgctgagctgcctggttgcaagtatctaagacagcggatgcggtggctgggataccaatatttgaactcctcataagataagcactgtaatgcccagggagcagggtaggcaggtgggtctgactccgttactggaagtaccaataaaagtacagggtcattagaaatggaccagtcactgaggtgggcaatggagacttcattcataacgattacggcggtgtttccatcatggctcagaggtagcaatccagactgctatccacgaagatgcgagttggatccctggccttgctcagtgggctaaggatctggcattgctgtggctgtggcataggctggcagctgcagctctgatgcgccccctagcctgggaacttccagatgctaagtgtgtggccataaaaaaaaaaaaaaaaaaaaaaaaaaa

SEQ ID NO: 25 - protein, 502 aa, Sus scrofa
MTSYSPRCLSILKILMVLLVLSVGLFMFQSVFLDTDFSLLNSPIPSPTLDAQTLKLLPEKPDFYGENGLFPKNQCQCDAFGHQESYNLEDAYDPQDLPAVNLRRQAELEHFQRREGLPRPPPLLAQPNLPFGYPVHGVEVMPLHTIPIPGLRFEGPDAPIYEVTLTASLGTLNTLADVPDNVVKGRGQKQLNILTSSRELLNFILQHVTYTSTEYHLHRVDVVSLESKSSVAKFPVTIRYPVMPKLYDPGPERKLRDLVTIATKTFLRPHKLMTMLRSVREYYPDLTVIVADDSKEPLKITDSHVEYYTMPFGKGWFAGRNLAISQVTTKYVLWVDDDFIFNSKTRIEALVDVLEKTELDVVGGSVIENTFQFKLLLEQGKNGDCLHQQPGFFRPVDGFPDCVVTSGVVNFFLAHTERLQRIGFDPRLQRVAHSEFFIDGLGSLLVGSCPHVIIGHQPHLPVMDPELATLEGNYTSYRANTEAQIKFKLALHYFKNYLQCVT

SEQ ID NO: 26 - DNA, 58425 bp, Sus scrofa
  modified_base (5753)..(5852): a, c, t, g, unknown or other
  modified_base (9176)..(9275): a, c, t, g, unknown or other
  modified_base (18671)..(18770): a, c, t, g, unknown or other
  modified_base (26990)..(27089): a, c, t, g, unknown or other
  modified_base (45736)..(45835): a, c, t, g, unknown or other
  modified_base (48911)..(49010): a, c, t, g, unknown or other
  modified_base (52558)..(52561): a, c, t, g, unknown or other
  modified_base (52565)..(52664): a, c, t, g, unknown or other
ctcacttccccccccacccccgtcctttccctctgtccctttgtccctccaccgtccctccatcatggggtccacctcgggtcccaggctgctgctgctgctcctgaccagcctccccctagccctgggggatcccatgtgagtaatcacaaccccaacccccaaacaaggctgcttctgcattgggagtgggcacttgtgagtataggtctctgcaggtttagggtgcatgtacggtgctggttgattctgtggcttgtgatgaggttggggtgagtctcagaagttggggttgggtgagtctcagaagtttggactccataggatctgggagtttgtagttttagcatttaggagtttcagagatgcggtttggatgtatgtggctgaggggatggattgggttgtatttataggtctggggtgctagaggtttaggaggctgtttagggtgttccagggtttgggtatttagagacttgaggtatttaaagatttaggagttctgaccttggagcagtgggttaagaattcgactgcagaggccagggtcgctgatccggtgcgaccataaaatgataaaaaataaataaacgattaaaaaaaagattgaagggttgagacttctggaatttgtgggtttgattgtgggcttggaagtccatcgtcttggaggaattggttctgattttgaggttcaggaattgatgggatctgaagcccccaagctgtcctccagtcatcggatcccccgcagggctaggggctggggcagagcgctgaccctgggggtgcctagcatctcgtgcccctgggatgacagctctacgcctcgtcctcccctcccgcagttacaccataatcacccccaacgtcctgcgtctggagagtgaggagatggtggtgttggaggcccacgaagggcaaggggatattcgggtttcggtcaccgtccatgacttcccggccaagagacaggtgctgtccagcgagaccacgacgctgaacaacgccaacaactacctgagcaccgtcaacatcaaggtgggcgcgctcaacagccggaccgctgaagccccaccccttctttgagtcctcttggtagctgagcccctcctccctttctgagccccacccaccctgcctgagccccgccccttctgtctgagtgtctccattctgaaccccgcccctctgagtctcctccccttcggagcccttccccttttggagtccgggtcactttttggagccccctcccactctctcatcccggtctttctctgagtgtccccaccttctgagccctcgtctttctctcagcccggcccccttccaagccccaccatgtctgagcccttccccatttctgacccctcccctccaaccctcctccctaagtcctttcttcttttagaacccgtcccctctccgagtctcctcccctttctgaaccccctaccccttctgagccctccttccgctaagccccctgcctgaatcccccttcccatccctccctctgactccctaccccctctcttgccctttggcccttccccgagtacctcttctctccccaaacctgggcaaagcaggaggaccagaagtgacaagcaggctctgttgcgaggaggggcgggtgcggacccagccgaagtcctagaggctggatggtgggcaaggggtcttggcccctagtgatcccctggttcctgctcagatcccggccagcaaggagttcaaatcagagaaggggcacaagttcgtgaccgttcaggcgctctttgggaacgtccaggtggagaaggtggtgctggtcagccttcagagcgggtacctcttcatccagacggacaagactatctacaccccaggctccacgggtaaggggctgagggtggctgcagagagccaggggcagggctggaggaaggggcagggcctcacccggctctgcttttctctcccaccactgctcagtcctctatcggatcttcaccgttgaccacaagctgctgcccgtgggccagaccattgtcgtcaccattgaggtaccagccgactggggccccagacatacccagggcagggactcggggagagacaaagagagagagagaaacagagaaagggattccggcaaaggcccagcagcagagacataaaggcaaaaaacaaaaccccaaaaacgtaagggcacacagagagatcgggagagaggcggggacccagcgatgcttaccgtggatgacggctccagataagtccctggtcactgtgtgaatctggacaggtcacttcatctttccaagcctcagtttcctcatttgaagactgacacgacaggtactaattctatgtagtctgttccgcctactgcccgccagagggcgcgtgggagcacctgagtcaggttccacccctcctctgcctgccgttttccagggctccccgctcctggggtaaatgcccaagtcctccccacgggcctcaaggccctgcaagacctgctcccgcaccctgcccaccctcctttcttccctctctcttcctccctccgctccagccacgtgggcctcgtcaccgttcttgcaacaatccaggcacagtcctgccccaagacctttgcaggggttgttccccctcccccccaaatgctcttcctgcaaatatccacacagtttgctccctcacctccttcaagtctttgctcaaatgtcaccagtgtaccaattttacagtgaggcttgtcagagcgccctgtaaaattgcaacagaacacacacacacacacacacacacacacacacacacacactcccttttttgccttcctgccatctctttttggcatcttataaatcggagttatttcccccctcccttttttggtctttttatctttttagggccgcacccgcagcatatggaagttcccaggctaggggtcgatttggcctaggccacagcaatgtgggatctgagttgcacagctcacagcaacgcaggatccttaacccagggagcgaggccagggttcaaacccaagtcctcatggatacttgttgggttcgttaaccactgaagcacgatgggaagttttttggggtttttttttgtgggacctattcctttgttaactgcgccttcccccaatctgcactgaacctaagttctgttcagaaagggattatctgttggcccagagtttggcgggtagtagggtaaataaaaacttactggaagaagggagggagggaaggagaggggagtgagaagcagggagtgatggggagagaaagacaagtggaggaggaaggggaggaatggggcctgtcctccttgtgggatctttgtatttattgaaatcaggcaaacctaacaaggaccagagtttttgtgtgtgtgtggtatcagtatgtgtgtggggtttttttggtttttgtttgtttgttttttgctttttagggccataccctcagcatatggaggttcccaggcttagggtccaatcagagctacagctgctggtctacaccacagccacagaaaggcaggatccaaaccacatctgcgacctacaccgcagctcacagcaatgccggatccttaatgccggactgaacatgcaacctcatggttcctagttggattcgtttccactgcactacgatgggaactccaaggagcgggttctgaaggctgtgtgctcactttagtgatggtggaaaacagagaacaccctcctctaaagatgtggcgctgccagactcccattgaacgtcacctcatgccattgggaagaacatatccacaattacctccacttgccagagaagctagagaatcagatttctctttgaagtctcctgatgtttagctattggcaacaaatgaaatcatatacttattaggttgagccacacgaagttgctattcttgcaggtcaaaaaggtgaatgtaggcagtgatgtgtgccttctacaaatcaaatgctcagcccagggtcctatatcaaaggaggtgataaattctagtaattactagtcttcagagcgacacagatcatcacaagcacttgcctacactaacaggtcccaaaccagtgacacaggagctgtagttatctcctttttccaagaggttcacattgagcacaaagaggttaagtaatttgcccaagatcacacaggcttgtaagtggtgcagtggggacaggaacccaggctacctggtttgggtgcccattcttaaccactgcccctgtagacacgacacagaggagaaccaaggggctaagcctggtctctgaagagccacttcccttcctgtctcctcacagacccctgaaggcattgacatcaaacgggactccctgtcatcccacaaccagtttggcatcttggctttgtcttggaacatcccagagctggtcaagtaggtcgggccctccagcaggggtggggtggagtggtcgtgtgttttagggctccccaggagagggagtgggggggctgccagacctggcggactcactagcctgcctcccccacagcatggggcagtggaagatccgagcccactatgaggatgctccccagcaagtcttctctgctgagtttgaggtgaaggaatatggtaagaagaggagggagctgggggggggggggcgtgcataatgttggacccagcgttgaccccccccaccgaacgaataccatctgctcccccccaatagtgctgcccagttttgaggtccaagtggagccttcagagaaattctactacatcgatgacccaaatggcctaactgtcaacatcattgccaggtgagggtctagggggagggcctggggagagggaaggtcaagggatagggcagggatggagggggaggggctcgtcacggccagtggacatttgggggaagactcctcttttcaggaccgggggagtctgagaccccttcccactttgcaggttcttgtacggggagagtgtggatggaacagctttcgtcatctttggggtccaggacggtgaccagaggatttcattgtctcagtccctcacccgtgttccggtacctaacagtggccccctctgagtaactcttcctctccccctcggaagcccttcccctccctgagccctcgctttctcccccagatcattgatgggacgggggaagccacgctgagccaaggggtcttgctgaatggagtacattattccagtgtcaatgacttggtgggaaaatccatatatgtatctgtcactgtcattctgaactcaggtgaggcccgatctgagggcggaggctccgtaccaccatgtggtccagcctgagaggggcagctcagtggaggggagaggatcagaatgaagggcgacccagtctggtggggggcggtgtgtccagtctgagggaggaggtccagaatgaaggcagggtcgggtctgacaggggagacctaggctgggacacaaacccagtctgaggggggaggcccagtcagaggggggaggcccaaaatcaaggtgggatccagttcatgggggagacctagtctgaggaaggtggggtccgtgttgaggagggcagtctggccctccctcatggctggcccccctcaggcagcgacatggtggaggcagagcgcaccgggatccccatcgtgacctccccctatcagatccacttcaccaagacccccaagttcttcaaacccgccatccttcgacctcannnnnnnnnnnnnnnnnnnnnnnnnnnnnnnnnnnnnnnnnnnnnnnnnnnnnnnnnnnnnnnnnnnnnnnnnnnnnnnnnnnnnnnnnnnnnnnnnnnnagctgtggtgtaggttgcagactcagcttagatctggcattgctgtggctgtggtgtaggccagaggctacagctctgatttgacccttagcctaggaaactccatatgcagtgggtgtggccctaaaaaaaaaaaaaaagttttccctcctgcaccagctccaacaccccaaatagtttggtgtgtgttttctagaaaaaaaaagatacaggcagacctcggagtcagttcctggccatgttaataaagcaagtcacataaattttttagtttcctagtacatataaaagttatgtttacactatgctatattctattaactgtgcaactgcattgtttaaaaaaatgtacatacctttattttaaaatacttgattgctatcagagtttcccagcggctcagcagattaagaatccagtattgtcactgctgtgactctggttactgctgttgatgggggttcaatcccctggcctggaacttctgcatgccgtgggcatggccaaaaaataaaagaagaaaaaaaatttaaaaattaaaaaatgctttactgctatcaactatacttcaaagaaaaaattgctagagtaaaaaataaatgctttattgctaacaaaagttaaccatcctctgataacgcagaggtcacaagcctttgatttgtttttcaaaaatgcagtatctgcaaaactcaataaactgaggtatgcctgcattctcctacaaacccacagtgcagtcattagaattaggacgtcaacattaattcattactaccctcaaatcctccatcaccattcaaattttgccagggttttgttttgttttgttttttggtgtttggggttttgaggttttgtttttgtttttgtcgtttatagggaaaggatcctgtccagaatcacaggctgtgttttctggttgggtctcttcagtgtccttggacctgtctgacctttagagcactttcttctttctgtgactttcacatccttgatggatacgaagtacacagactgagatcttggggactgtcccaccatctgggtctgcctgatgctccttcatgacagcactcaggttttgcatttttggcaggactgtcacggaagagacatcgtgtccttcttggtgcaccatttcaggtgacaaagggtactgatttatcccactctttggtgatgtgtaccctgattgcctgattaagctaatgtctgccgggtctctccattgtaaatgtcctctttattcctttttagttatttttaaaaacttctctttaactatcagatagtggcaaaattcaagtcaagagagatttccctccaaatcagtgttcacttagcctttaagacaacaggggtggattccttatattgtaatgtatgattttcaaacacaaccgtactttttttttcttttctttcttccttcctccctcctttcatcccttcattcttccttcctttcttctctttttctttccttcctttttttttttccttacaaaaaagcacccacctctcaaaggcagccattgattgccaaaatgggcaaacatttctaaattcctgtagtggaaagctagcagcccctgcagccctccaaaaagaaaaagattcccaatacacatgagcaaaggatcttcagtctctttgcactttataactaggcgtgctgctttctgctccagtgacccaagatgttcttttgcaaagaggaacgtttttttgcaaggaggaaatttagacaaaacatctgatttagaggggtacagtttacacatacgtggatttttttcaacattgtgtcattactttaaccagttgggggtgagccagaggattgattaaaagtcagtaccccaaaggcactttgatggattattccagagcgcagatggatttaggcatctctggaattccacctacttggttgtaaggcagacccagagccaaaataaaatctgttcatcatttttttgaggaaagcccagccagggttgaactctgttcccgcccagcttgctgatggtgtcaagctggcttttaaaggccacctcctctccagcagtctccatcaaagtccagggaatctttcaactcaccccattgctttcaggaaggacttttaaccatcagacacagcagcaggcatggtactcagggcccaggatgcttctggagggtcttccgtgcaaaggtttcattccctcaaaaaccaaagaagggaaagaaatcaatacaattcagcctggattatttttgcctttatgccaacacagttgtaaaatagggtttcccatatattttatggaagaaggagcccccagagtcaaatgggcctggggtccctggaagtgatcacatggtcatgggtgtgtggcagctaggaatccctccggggattgtagagatacgtgtctaaaaggggacagcgagaaagtgagtctgttccaaacctgggttgttcccctcctcccctcttcccccaaaaggtgacctggatgaagaaataatcccagaggaagacatcatttccagaagccagttccccgagagctggctgtggaccattgaggagtttaaagaaccagacaaaaatgggtaaggctgggatgaccctgcttcaacccccgccgccagtacccagggacagccccctctcatcacactagaactggacaatgaatttgcaggtacctggagtcccccttcttttctttcttgggggaatcccacaacccaacctaaaaaaatcaagcccttgggctatcagccactgccccacacactacagtccgttcctttcgcatctactaaaaatttatcttgtgtttgtttattcttcattcattatattttctttctttctcactgcctgcgctgtgactccttttctctctacattctgtttatcatcatcttccacacaactcatttcttatcctcaccaccaccactctctgctccaaattttgaattttacacccagactcctctctgctatgtgaagcgcctacaccccgtcactagtgttactctcttatcgctgacctcccttgtaccctcccatttatttcttttttttttttcttttgccctatctacctgcctctctttcccatcccatgtttgccatgttgaattatgtttatttaagaatatgtttagagagtgatgtctctattgatgatgactacctgctgtctctcatccgcgcgacatattcattatttataccatttggcgtacttcacttgtctaacacaatccttatccgtatataaagagatgatgaagaaccccccgcccgcccctgnnnnnnnnnnnnnnnnnnnnnnnnnnnnnnnnnnnnnnnnnnnnnnnnnnnnnnnnnnnnnnnnnnnnnnnnnnnnnnnnnnnnnnnnnnnnnnnnnnnntaacccactgagcaagaccagggatccttaacccgctttgcacagcaggaactcctgggctttttttttttttttttttttttgagccctgagattttttaatcccccccccctttttttggcttttctagggccgcacccgtggcatatggaggttcccaggctaggggtctaatgggagctgtagccgctggcctacaccacagccacagccacagccactcaggatccgagctgcatctgcaacctacaccacagctcatggcaacaccagatccttaacccactgagcaaggccagggattgaatctgcaacctcatgcttcctagtcagcttcgttaaccactgagccaggatgggaactcccttaaattcctgacatcttctcaacatcaactctcttctcaagatcaactctctctcatctcatttttttttttttttttttttttttcttttctagggacgctcccgtggcatatggaggttcccaggctaggggtcgaatcggagctgtagccaccagcctacagcagtgtgggatctgagccgcatctgcaacctacaccacagctcaaggcaacaccagatccttaagccactgagcaaggccagggatcgaacccgaaacctcatggttcctagtcggattcgttaaccactgtgccacaacgggaactcccaaaataagagatttttaaaaaccgttttaggattccagaaacaactgagcaaaaaaatataccaatggctgagtaatagtccatcatgtatctgtactacatcttctttatccactcctctggacacttaggttgcttccgtgtcttggctattgtcagtagcactgcagtgaacacctggtgcattcaaattatggttttcttcagtcttttccatttttaattcctttttttcctttcaaatagagagcaaggggtctagctttcctcaggcagcataagctaaccaatatttaacacaatcattctattttccttgaggacactcttatttatagcacaagaacctggtttctcacccatgtcctaaattaaatttaagtttagaaaaatttataaaaacaaatagtaagtaagaaatggtaaggagcaccagtgactaatcagacaccccgagggtgatgagtaaatgacagtaggttgggaaataaggattttgttcaagcctctgattataatttttttttttgctcttgaagaataagaacaatgcacaaatcttaatagatttcttagtgtaacattattaataatgtgttaacagtttgtgcagtttcacttgcatcagcactctgcttgcatttgatcaggtaatttttgtgtcatatataacattgttttcagcatcatttttgatcaaggttgttatcaaaattcaacggagtaaatttgaagatgtaattggctttattaaacaattcatgaattgggcagcgtctcatctggcaggcagagagatactcagaggagttgtgaaaaatggaaggttttaatagaatgaagtctagggcaagagagtaatcgcaagatacaaatttcatcattggaggaaaataacaattcaggtgggagaggatctccttggctgagctacagtattttcattcgctgggctttttactgggcaggaagaaagtcttccttcctcctgctgcagtaaatttcacttcctatttgggagtgcaaggtacttctctttcctttggggtctgtaattgatgcttcttcctgttgggatctgtaattgacatcttcctgtttggggtaattgacttgcttggtggagcattagagctccctctacaggccttccctacttcaatttagttaaggtttacttttactaatttttacaatgtaaatcagtgctgtccattagaaatataatgcaggttgtaaacgtcatttaaaattttctgatagccctgtaaaaaagggataggtgagtgagttcccttgtggcacagtgggttagggatcctgcatcatcactgcagcagcccatccctgctgtggtgtgggtttgatccctggcccaggaacttccacatgctgtaggggcagccaaaaagaagggatggtaggtgaaatcaattttaataatacattttatttaatccaaatatatcctaggagttctcattgtggctcagtgggttatgaacccaacttagtgttgtgaggatgtgggctggattcctggccttgctcagtgtgttaaggatccggcactacctcaagctttgcataggtcgcagatggggctggaagctggtgttgctgtgactgtagtgtaggctggcagtgacagctcagattcagcccctagcctgggaacttccacatgctgcaggtgcagccctaaagagaaaacaaacaaatatatccaaaatattattatttcaacattttgtaaaaacttgcaaaaccactatcacactgatactgttacaataataaatccattaatattttaaaataagctattaataatctcaaaattgtgatatcttttagttttatttgtactaagccttcaaaatctgccatgtattttatacttactgatatctcaattagaatgttagcttttcattagaaatactttgatctgtaattaccatccataaaatttacagttaaaaaggaaagtgtacccaagttgttgtaaatattcttttttctttctttttttttgtatttttgacttttctagggccacttctgcggcatatggagattcccaggctaggggtctaattggagctgtagccaccggcctacgccagagccatgtctgcaatctacaccacagctcacagcaatgccagatccttaacccactgagcaaggacagggattgaacccgcaacctcatggttcttagtcggattcgttaaccactgtgccacaatgggaactctgtaaatattctttaaaaagttatccagtcactgaatcaagcatccttttaaaaattgagatacaggagttctctggtagcctagcagttaaggatccattgtgccactgctgtggctcaggtcgctgctgtgatatgggttcaatccctggcccaagaactttcacatgccatatgcacagccaaaaaagtgtaaaataaaacaaaattgtgatctaattcacataccacaaaagtcaccctttgaaagtgtacaattcagcggtttttagtatattcacgatgcacattgtttttgttttttggtatttttttttttagggctgcacccacggcatatggaggctcccaggctaggggttgaatcagagctgcagctgctggcctataccacagccacagcaacaccagatctgagccatgtctgtgacctacactgcagcttgaggaaatgccacatccttaacccactaagcaaggccagggatcgaatccatatcttcatggatactaattgcatttgtaaccactgagccgcaatgggaactcctgcacagtgttttttcttttcttttttttttttttttcttgtctttttgtcttctctagggccgctcctgcagcctatggaggttcccaggctagggatccagttggagctatagccactggcctacgccacagccacagcaacaccagatccgagctgcatctgtgacctacaccaccgttcatggcaacaccggatccttaacccactgagcgaggccagggattgaacccgcaacctcatggttcctagtcggattcgttaaccactgagccacgacgggaactcctggtttttaagttgaaatctgagttaactaaaacgaaataaaagtaggaatccagttctcaactgagctagccacatttcaagtgcccagggtccacttacagtcatcattttggagagcacagatcagaaccttcagttatgcttgccttcttcccttctgcatatttacctatgaataacattacaaagaaaatgagaatttctctcacagcaactcccatccaccaccaccacctgtaagatatcactattaatgatgtgtctctgggctctgccagggcaggcggagcttgggacagctcttgtggtcaggggtgagccctgagatattggcagggtcaggaacttggacctgaacttggatccagcccaccctccctgccccctaccaccgacgctgtgttctgtttccacctgggcagggatctgcgtggctgacccctatgaggttgtggtgaagcaagatttcttcatcgatctgcgtctcccctactccgttgtgcgcaatgagcaggtggagatccgagctatcctctataactacagggaggcagaggatctcaaggtgagcctctagtgtgacaggcatgatggggagcttggagggagggtccatggcacactctcctgacttgatactccctcttcctggcaggtcagggtggaactgctctacaatccagctttctgcagcctggccaccgccaagaagcgccaccaacagactctaacggtcccagccaagtcctcagtgcccgtgccttacatcattgtgcccttgaagactggcctccaggaggtggaggtcaaggccgccgtctacaaccacttcatcagtgatggtgtcaagaagaccctgaaggtcgtggtgagtctttggggatacctgctgccccttgtccttcaggaaagactcctgtcttcctgtgctgtgaacccaggttggagacccaggctaagaatacggagtacttctcagaaaatttaggagttccggaagtttggaagcagggctgggattagggtgaggcaagtgaggcattctccttgggcatggaatttcaggggacactccaaagcttagtaacagagatcaatgatattttttcgttaaaatatagtttaatgtcaaatatgacatttcgtaacacatttcagcagaggagttttctcttgactaaaaatcttgggaggagttcccattgtggctcagtggttaacgaatccgacttggaaccatgaggttttgggttcggtccctggcctcgctcagtgggttaaggatccagcgttgccatgagctgtggtgtaggtcgcagacaccgctcgcatcccacattgctatggctctggtgtaggccagcgactgtggctccaattagacccctagcctgggaacctccatgtgccgagggagcggccctagaaaaaggcaaaaaaaaaaaaaaaaaaaatcttgggaaagcatatttcacagaacaaatattataaagccataacatacaatgctagaacagaggaaacgtctatttctacctatgattcttaccttaaaatatgcattaacagttacttttccatgtcctatgattaaacatataatagataaaatcaacaataaaaataaaagtattatcatcttttagtaacgttttaaagcaaaatgtgagatcataaacaagatcaaaaatatttaattcaagagtacctgttgtggcttagcggtaacaaaaatatttaattcaagagttcctgttgtggctctgactagaatccatgaggatgtgggcttgatccctgaccctgctcagtgggttaaggatctggcattgccatgagctgtggtgtaggtcatagaagcagcttggatctggcattactgtggttatggtgtagccagcagctgctgctccaattcaactcctaccctgggaacttccatgtgctgtaagtgcagccctaaaaagacaaaaaaagtaatgcaatatattaagaaatcaaaattaatgccccaaaccctcacaacaaacaaaatatcaaaattttaaatagagacaggatctgacagtgtcaaggcaaaccatattggagcctgaagcagaagaaaaatgagttgctccataaatgtgcctgtatgtatttttaaatggttaattttccccaaaaacattacagtagctgaaaaaatattgaaacattgaaaaccaagtgtattaaaattgacagagtgattttccattgaagtattttgtttatacccaaaccagaatttattataatttttctttattggctttaataaaagcaaactcatatttttttcaactactttactgttctggaataaaattaaccattaaaaatatgtgaaagtatatattttggggcacatatttttctttcttttctttcttttttggggggtgtctttttagggccgcaccatcagcatatggaggttcccaggctgggggtcgaattggagccattggcctatgtcacagccacagcaacgccatttctgagccaagtttgtgacctacaccacagctcatggcaatgccagatccttaacccactgagtgaggtcagggatagaacctgcatcctcatggatactggtcagattggttttcactgagccacgatgggaactccacacacatttgtccttttgccttgagtttctatatggctcagcttgggcactggtgagaagaaagccaggattttgttagagtttatattgcccagctcccaaaagccagtgtgcccatcacttcacaattctgtactcactgtggctggtagcttgaaaatcaccatgttgggaatatttacaccaaggaaattggcagcactacaaattaggaacttttcttcctgaaaagctggatgttatatatttaccaacacaccattggaggcatcttagtctgcaaaggaaaatctgggaattactaccaggtgaaaggagaatgagttctaggaagacaaaaacagccaccgtccaccatggagatttatgtgtagacacataagggcttgtagtgggcctttgatcctaattaagacagttctgattttaactgagcccttactatgtgctaggcactatgttaaatacttgtgtgaatcctttcatttcttttgtgagaggggggtctttttaggaccacacctgtagcatgtgggagttcccaggctagaagctgaacgggagcttcagctgccagccttcgcctctgccacagcaacgccagatccgaaccacatctgcaacgccacaccacagcccatagcaatgccgtatctttaacccactgagcagggccagggatcaaactcgggtcctcatggatactagtcaggttcattaccctgagtcacaacaggaactcctcatttcttttttctttactatttattctcatttgtttatttgaaaatgttgttttacttttaaattatttgttttattttacaatttttatttttattttagttagcctattgagaggcactgggttaaaaacagactctggaaccagactctcaggttcaaatccacactgtgttctactagctatgtgaccttgggcaaatgacttcatccatctgtaccccagttcccccatcttgaaaatggaagtgataatagcagtatccaccccattgagtcgttgtgaggattaaatgaattaaccccagtaaagaaatcttttaggcacataggaagatttctatagattttgttaggtcattattaacttataattttattattaatctatacaacaatgggtacgaggtagatgtttatattatgtctttataaggaagagagctgaggcacagacaggtgaagtaagtgacttccagtcacacagctaagatctagtggatgccatcgtgcatatgctacagtaatccccagaacaatgcctcgctgaccagctgtctgtctgtctgtccttttcttcacgggactccccctgcccccaacactatccagccagaaggaatgagagtcaacaaaactgtggtcactcgcacactggatccagaacataagggccaacgtgagtcagccacagaaggggtgagggctgggtggttgaggcagggtagggtgggaggggggtggttgaggcagggtaagagtgggagggggctggtgcaatgggtgtctcccattctcccggcagagggagtgcaacgagaggaaatcccacctgcggatctcagcgaccaagtcccagacacggagtcagagaccaagatcctcctgcaaggtgagaggcccttggcttcgaccccaggggacccagaactgtgttgggggggcatgagcccagttccatctcatccctcctcctcttcagctagaatttctctttgatctgcttcaggaaggctccaggcactatttagttcagccaatagcttttgctgatgaagaaatttattattttttaatgaatttattatatttatagttgtacgacgaccaccacaacccaattttataggctttccattcctaacccccagcacatcccctctcctcccaccctgcctcatttggaaaccatacgtttttcaaagtctgtgagtcagtatctgttctgcaaagaagatagatcattgtagctctgataaagaaatttaaataagaagcagtatagttccagagcagaaattctggatctgattgccctggatggggaactcgggcaagaagggacaagatagatctgaaaaggcaccttgcaacctgtaaggtgtaaagttttgggaggagacccttggttccctcatctgtgacgggggcaaataacagtatggttacctaagggttgttgggtgggattaaatgagatactatacagtgttctcttagaatagagcctagcaaatagcattaagcacgatataaatattcctgactattgttactggaattatgttaccactggtgtgtaacgagaggaaccagggactggaaatcccctgtgaagcacaagctcacccccaccactccgcaaatgcagaatccccctccagctgctcagctcctcccatcacataccctccagctgtccctgactcctttggccctggctggtcagagtctggaaatgctgggggcagccctggtcttgaatgccatcttaccgtctggctgcagggaccccggtggcccagatggtagaggatgccatcgacggggaccggctgaagcacctcatccaaaccccctccggctgtggggagcagaacatgatcggcatgacgcccacagtcatcgctgtgcactacctggacagcaccgaacaatgggagaagttcggcctggagaagaggcaggaagccttggagctcatcaagaagggtatatgccgcacctcctcctctgagctgtctaggcccctgagaccccgcccctccgagccccctccaaccagaggcccctcccctctagaggccccacctctctgagccctctccaaccagagactccgcccctctataggcaccacccctctgagcccctcccaaccaggggccccgcccctcctctgagaccacccccttgctcctctcnnnnnnnnnnnnnnnnnnnnnnnnnnnnnnnnnnnnnnnnnnnnnnnnnnnnnnnnnnnnnnnnnnnnnnnnnnnnnnnnnnnnnnnnnnnnnnnnnnnncctctatctgatcctcccactttctactttaagctccccttccccaccccaaacttgtcccctgctcagaaccctctctttcttctctgtacccctgtcccacctctcacagaatctttatcctctttctaagcccctcccctccctggcctacccatggtagccaccccctccactcagcctctgttgacacttctcccttctcggcagggtacacccagcaactggccttcagacaaaagaactcagcctttgccgccttccaggaccggctgtccagcacctggtgagtctccaagatctgcttgcccatccttagccttgcacctccctgagcagggcctggatcccggcctcaggtggtctaggttggcctcgcccacacagccctgtgcgacttgacccctctactcacgaagtcaaaacaccagccagatgagtggcctgcatgccacaccgggtcctgagtttggggaagagaaactgggcggaccaggccaggccccgcctctctctgttcattgcttggctgggatgcagtcttcggatcccagagccaattggctcatgctctgtgtccgcaggctgacagcctatgtggtcaaggtcttcgctatggcagccaacctcatcgccatcgactcccaggtcctctgtggggccgtcaaatggctgatcctggagaagcagaagcctgatggagtcttcgaggagaatgggcccgtgatacaccaagaaatgattgtaagaggaagggactcagagcaggcagggggagaggggcatctgagcatcacaggttagcggggtgggggggtgggaggaagactccaccatccacccatggcccaatccattgtgccaggggacaggggataagggagctgggagtgccactcctccattgcaaaaaacaaagacttgcaggatccggtgcaaaaggaaagttcccaggtcacagagctgcttagagccgtggtcctcaaagtgtggtccccaagccagcagcatcagcaccacctgcaaacttgttaaaaatacacattttcaggatggactccagaggcactgaatcagaaacaataggggcaacgtctagaaattggagctttaacgcacatatacacacatctctgctgatgctggtgtgtgctgaagttggagagttgctgccttagcctgaccttgctggctttcacacagctttctcctgccccccttcacactctacctggactgctagaagccttgctctgtccagccacagggcctttgaacatgctgtttctgctgcctgccctgctaacccctgccctctttgagagttgactcctactcactcttcagattgtggttccatctgtcacccctcagagacacttttccacgactgagtcactcttccactgtccattctcaatgccatctccacttctcctgcacagcactcatcagtttgtaattatatatctgtggatgacctggttggctcatgtctgtctcccctactagacagggagctccatgagggctgggctggggtctggttttctcccaccatcttatccacagctccatcaacatttgcagaatgaatgaatggatactaaagagcttggccctcttggggagaccctggggagagacccagccctgccttgacctgctgatcctacaggggggtggtgggcatgtggggacatgatgttcacccgctccgggcttcctgcttcccctctagggtggcttcaagaacactgaggagaaagacgtgtccctgacagcctttgttctcatcgcgctgcaggaggctaaagacatctgtgaaccacaggtcaatgtaagtgtcccttgcctctccctcctcccctcccctgctcaggacacatcaggtgaggtatggatttggggccatttccagtcctcccagtgtgacaaccaccatcacagtggccataagagtacctaacatttatcgagccattaactaagatactcacctaaaagcttcacatgtttaagtcctgtaatccttgtagcagcccaagagacaggctacccttattatccccagtttttagaagagaaaactggagctcccatcatggctcagcataaatgaatctgactagtagccatggggacacaggtctgatccctggccttgctcagtgggttaaggatctggcgttgctgtgagctgtggtgtagatcacagacgaggctcggatcctgtgttgctgtggtataggctggcaactatagctcctatttaacccctagcctgggaacctccatatgctgtaggtgcagccctaaaaagacaaaaaaaaaaaaaaaaaaaaaaagagagagagagagagagaaaattgaggcacagagagatcaaagatcaggtcctttccgcctgttctcccatttctagagagtcatagccaatttcagcagaagtcctctcagtttgctttccacagcactcctccacatgcctccttgctgcttccctagagaaaactcaagacacagagcttaaaaagaggagaaaaaaaatcctcaagaccatttccttagtttagagggtctttcagggtatttttttaaaggagtccatgatcccaaaagggaagggatttaaaatgttgactattcactgtccccttttcctctggctttggttctgaagcagagaagtttgaaaagacaggctctggagaatctgtaatcactccatctgctttgccctgggattttgaggctgggttgcttgactttagcttccctacaggggaacctcaggctctcatcttcagccagctgcttctacctcctcagaaccccagaaaagggatggaggggaggggccgttgcctttaatgcccaaaagggcccaggccttcctggttccaacctggaagatttgagagaaattatagtagaaatgagacaacactaggactaggcacggggtaggggtggggatgtcagagagaagtgacttcaaagcctgactctcaggcacttccccttcaaggccttaatgtgtgcatctgtaaaacgggtatggtggtctttgtattgtttaggactctctgcattgtcctagatggaacacaagtgtgacccagattatgcaaaaatagggtatttattttagggatccaagaatttatcaagtgcaacgataaaagagtcctcagggactctgccagaatgcttcgtttttcacgtcctcccatatctttccttcccttcttgcctaataattcaactttcctggccatccggcctgcctggccaaactgtcttccttggggaaatagaccaaagcaccagcagcagaatctcagtgacagattctgattggctcaccgtgggtcaggtgatcacctgtggaccaatcagctgagggaggcagtaggtcttagtgggcaactatgtgcgcttctggtgcggccttgtgagtggaagtgaggtgttctaacaacagtcatcgacaggtgtagaagagattcctgggcaggcaaaaggatcatttctactgtaatataacattttttactatacatattataatgaagtatggcataggctgtggaacccgactgctggcatttaaatcaggagtatgctgaacccatccgtgtaaaatctgtaaaaccagttgttaaatttccaggaatttgcaagctggctgttaaacacgatcgtgattaaattaaattataaacttacagtgaaaaactgtaaacattaaacagtaaaaacaggcgttcccgtcgtgacgtagcggaaactaatctgactaggaaccatgaggtttcgggttcgatccctggcctggctcagtgggttaagaatccagcgttgccatgagctgtggtgtaggtcgcagatgcggctcagatctggcggtgctgtggctgtggtgtagaccggcagctgtagctccaattagacccctggcctgggaacctccataagcctcaggtgcagccctaaaaagacaaaaaagatttttaaaaaaaggacaaaaaaaggagttccgtggtggcgcagtggttaacgaatccgactaggaaccatgaggttgcgggttcggtccctgcccttgctcagtgggttaacgattcggcttgccgtgagctgtggtgtaggttgcagacgcggctcggatcccgcgttgctgtggctctggcgtaggctggtggctacagctccgattagacccctagcctgggaacctccatatgccgcgggagccgcccaagaaatagcaacaccaccaaaagccaaaagccaaaaaaaaaaaaaaaaaaaaaaaaaaaagacaaaaaaaaaagtaaaaacgcaggtagtaaacacttaaaatgtatcacttcctaaacattttgctatcttttatcatggttcttttgagaatttatgtgtattgtacttgtatagtggaaatattatgtaatgttgaactactgcccatctcttcccaaatctacattcaatgatgtgggttgattgatggattgaaagcagccatgataatattgacatcatagaaatgacaaacccttcaaattatgttttcccccaacccctatctttctgggtcacagcatttttctctgacaggaggataatgatgaaaataatacctacctcatagtatattatgagattaagtgagcaagtatatgcctgggacatagtaagagctagctatgatggggattactctcagataagaagtgttcccttggtgagctgaatctggctcacactagctcacgagtgcctacggggggcatctctaccccactccatgttcagggacttcacattggtagcttaaaactgaccatggtagaatttttacaccacagtaattggtgatgcataaaggagcacccctcccccaaccccatgcctccattggagagctgattgttaaacattcaccagcacaccatggggtatacagactgccccccccatccccgctgccagcacatagtaggtactcagcaacaaagcagctcacaatgagaaaacttcaaaagtaggtagtagatccaaggcaggtcccaaggacagataccatcctggcgcccaggaagtgatgcttgtgtgatccttactagttctctgtggcagcaacgcccacttgatcagaatacccaatcctctttctcatagagcctgttgcgcagcatcaataaggcaagagacttcctcgcagactactacctagaattaaaaagaccatatactgtggccattgctggttatgccctggctctatctgacaagctggatgagcccttcctcaacaaacttctgagcacagccaaaggtaagaggcagcctggagagataaagaagggggtgcatggctagggtttgagggtggtcctctcaagctgggatgcatgcctctaagctgcactgggatgtgcatctccaagtggagctgggctggatggctctacaaggtgaaaagctctcattgtaaaccacacaggaaggctcactgcataattcatgacagcagtgaggtgtcattaagaacatgggctctgacctcaggcagactgaaaccgaaaccccactcagccactttctcactgcctgaccttggacaagtcatttaacttctctggaccttagtttcctcatcttaatacctacatcgcagggtggtcatgaagattaaatgtataatgcaagtagaagagagtctagcacacagtaagagctctgtcactgataccattagtgcctttaattttattttaatttttgtctttttagggccacacctgccgcatatggaagttcccaggctaggggttaaattggagccactgctgctggcctatgccacagcacagcaatgcaggatccgagccatatatgcaacctagctcacggaaatgccagatccttaacccactgagcaaggctagggattgaacccgcatcctcatggatcctagtcagattcattaactgctgagccacaaagggaatccaccttcaatattgttaaaaatattatcattatctgaaagcatagggaacttagcacagtgcctagcacagagtgagtgcttaatttttggtcccagctgatgacactgtatcatgtttgcactcactgatgtgacatatctcaagtaatggaatgtaacatatacaaaagtcatttaacacaagaataatttattggtggtggccggctctcctccacacagagatgcagagatctaggcctctatcttttcatagctctgccgctcagaatccatccatgtaagctgagggggaaatagtcaggaagactgtgcaagggaggtggaccaaacatggaaggggtcccatcattgctgtgcacattccattggtcaaagcttagttatgtggccatacctacctgcaaaggcatctgggagatgtagtccaactctgtgcccaggaagaggagggtatgattcttagtgacagcctctgccatcagtattttcttaggcacttgtgacatacagtgaatacagtgcagcccttcccattatggcctcacacctcagttgaggagggaaaatgaattaatagattactgtagaacattatagcattgggatagtagaagcacaggatgctttaacggacaggaggaagaagggcctcacttcctcttagggtgccattgaagctgaattgtgcggggtgagaattaaccacaggtagatggagaaaaattgctccaagtagagggaacagaatatgcaaaggctcataggtttaaaaaaaaaaagagcaagtttagggaatctcctgcagtggggctgcagttgagaattcaaatggaggagtgagggttgatgagggaagagagcaaggcagaagacagcagattgagggtcttgaatgtgggccaggacacttgaaaaccaagtccagtatgagtctttttttttttttctgagctttctctgagctatttacaggctgaacagagcattgagagtgggggttctctctgcagaaaggaaccgctgggaggaacctggccagaagctctacaatgtggaggccacatcctacgccctcttggctctgctggtagtcaaagactttgactctgtccctcctattgtgcgctggctcaatgagcagagatactacggaggtggctatggatctacccaggcaagtagccccacccccaccccacctccaccccaggcacctgcatcccaacctcttctggcctcccactagccttctggagtaggcactgagaccaagagaggtaggtcttctgtcccataagccaggatggttggaatgaagttgagaaatctttttttccccccttataaacccatctctggatctagactacattctgagtgctccaagctgtgttctgagcctctctttccctcttgacatctaggtcatgttctcagggctcaggttcagatgtgagcctctctctccccctggttccccagttccaccagattccctatcttatcctgtctcactggtaggttctagatcctgttcatctcaccagacccccaatattaccttgtctcattggtaggttctagactggatttttagttgttctgggccattatccaagcttctttctctcacttgtgggatctagaccatgttctcagctccttcaggctctcaatattaccctgtcttactgtgagttctagaaaagggtctcagctattctagcccccagtaggttctagaccatgggttctttagccccctttatttctagtgggctctcaatcacattctcagtgtttgggattccaaatcagatgctcagtgttcccaactttactcttttttaatgagtgggttctagacatattcccagcacttctagactcttgtcttagatgctctcctctagatgggtctagactactttctcactgtggctagactttcagtcttatgtctgccctttctggtgaattctagacatgttccccatgtctccaagctcttgtctgaacccctctcactcagagagttctagaacatgtcctcagtagccaacaaccctcgatcttgttcttgaaggccacaatgggtgggttcaaggccacagtttcagggccccagctctgatctgagactcttcatccctcagtggggtctaacaactttcttgttgcccagattcannnnnnnnnnnnnnnnnnnnnnnnnnnnnnnnnnnnnnnnnnnnnnnnnnnnnnnnnnnnnnnnnnnnnnnnnnnnnnnnnnnnnnnnnnnnnnnnnnnnaaggtagctgcgggaaactttcccagggaaacggtattccggtgtgaaatggtatggacaagaaaagctatttctgtgtgaaattgttatccgcaatccaggctctggaccccttccatgaattttctgcagtcctcatagtagtgcttcgaggtagggtgaccaagctattctgccattcctgagactctctcagtgttcgcactccaagtactgcatcctgggaaaaaccccttcccccaagacgggacctgggacccttggctgcggggcttgcacctgggaaatgtctccttgagcaacaacatacaaagaaaccaaatgggactaaaaatagctgcatgggcgttcccgtcgtggcgaagtgtttaacgaatccaactaggaaccatgaggttgtgggttcggtccctgcccttgctcagtgggttaacgatccggcgttgccatgagctgtggtgtaggttgcagatgcagctcggatcctgcattgctgtggctctggcgtgggccggtggctgcagctctgattcgacccctagcctgggaacctccatatgcggcgggagcggcccaagaaatggaaaaaagacaaaaaaaaaaaaaatagcagcatgcttgcacagttggggcagattatggacagcaagatataaaaagaccaaaaacccagctgccatatctgaggagccaggagcaaaagctgggtgctgtgcatgccctctgcacacagccccaccaagggggcaggcagaccacctaagccacccctctggcacccctaccctcaccccacttaaggaaccagctacacacacacacacacacacacacacacacacacacacacacacctgccccaagtaagggacacacacgcacatctgcccccagcaagggaatacttgttttcctttcttcctgctgcagcaggagctaaataaagccttgcctgaatttcttatcgggcctcttactcaatttctgttgactgggaaagccaagaagcctcatggttaacacccccagtctggggcaagccggaatggtcagtcactctacttcaaggtagacattaggactcccttttccagatgcagaaaagagtgcccaagagaggttgcctaactgttccaggtcagcccccaagtcagaacacaggaggagagccaagcagaccagaccacgctgggaaggagttcaggagatttgctcatcattctggctgtacccctcatgggctaccagctttgacccagctgcagcggagcctataagaaccagtgaatttgtgattctcagaggaggaaagggggagggggaaaggacagaagaagagggaggggaggaggagggagaaggggaggaggaagagatggggggagaggaaaaggaagagggggagggaagggaggcgcaggggaggaggatggggaaggaggagaggggagaaggctaacatattacacttatgatgttccaagtatctactaagcactgcctatatcttacctcgtttaatcctcatcaaacccctatgggattaactcctcttactctcatttccatggaaccaaagtcatggggcatggattggaacagccgaggtccccatgtcaatgaaccctggaaccaagatttgaacctaggcagtgcgactccagagcctatctcataacaactccccatggagttgaatcctcagaacttaatcccatcaggtaggcaggggttcatcaccctaccggataatcaggtgacaaaaccaagagatgaaggcatgtccccaaggtctaattgccttcaagctggggaagtctcttaccaaaatctgaccacgatcgccatggccactcacctgcaagcaaagagaagtctacagatccctttgatttttctttcctctcttttatggctgcacccgcagcccatggaagctcccgggctaggggtcaaatctgagcagcagcttccagcctacagcacagccatagcaaaacaggatctgagccacatctgtaatctgcgccacagatccttaacccactgaaggaggccagggattgaacctgcattctcatggacactatgtcatgttcgtaactcactgagccacaatgggaagtccctatagatccctctgagatctggccataagccatcctttcacaaccaggtaccctgtctccctgggtaccagtgatcacagtggtgagttatgaaagtgggaacgggatgtgaagaggaaaacccagtctctttctggggatttacctctatcagctcacgagttcttcacactttgccaggtaagaaaggatgggataccaatgttcattgccgccctacacacagtagccaagacgtggaagcaacctatgcatccatatgcagaggaatggataaagaagatgtggtatatacatacagtggaatattattcagccataaaaaagaaggaaatcatgccatctacagcaacatggatggacctagagattatcatactaagtgaagtaagtcatacaaatttacagttaaccaaggggatagcagggggtggggaaagataaattaggatttggggattagcagatacccactgccatatacacaaggacctactatatagcatggggagctatattcaatatcttgtaataacttataatggaaaataatctaaaagtaaacatgtatgtgtgtgtgtgtgttcactttgctatacaccagaaactaaaacaccattgtaaatcagctataattttttttaagggtttgggagttccctggtggtctagtggtaaggactcagcactttctccattgctgcccaggttcaatccctgatctaggaaccgaaatcccacatcaagctgctgcacaccacagccaaaaaaatgaaaaaaaaaaattttttttgtctttttgctatttcttgggctgctccagcagcatatggaggttaccaggctaggggtcaaatcagagctgtagccaccggcctatgccagagccacagcaacacaagatccgagccgcgtctgcagcctacaccacagctcacggcaacgctgggtcgttaacccactgggcaagggcagggatcgaacccacaacctcatggttcctagtcggattcgttaaccactgcgccacgacgggaactccaaaaatgaaaatttttttaaaatttttaatggttaaaagagggggggaatatcagccactcttggccccacccgcatccaccttgccaggttagcatcctatcccccgctgtctcactagccttgaagcactgcctgacacatccaggcatgtaacagcacagcctccgagcaggtgaacctctgtggtataattcacactccagagctcctcctgggaccaggctgcggctgaaaatctcctgaaacaccttctgagtggccatttcctcctcctgccccatcctgcttccctccctgcaagggtctcctgagagccctccctcaacaaatgagtcacataaaatcctcatctcaggctttgcttctccagaaatgaatgaaaaacaagtggcgatccttatttttgtgtttcagttttgttttgttttttcaaattttgaaggtctcctgtggtgcagtggattaaggatcctgtgctgtcactgcagcggctcaggttgctgctgcagttggggagttcaaaccctgacccaggaacttccgcatgccatgcatgtggctaaaaaataaaatgttaattgaaggcacaagggaaagagccagggtgggaaccaagagacctgatgttatcccttgttcggccaccatctcctagcaagtggccagctgtggttcaacctcctgggacacaagtctcctccccaccacattgggcatatgcattttcctcgtgcaacttacactgtgccattgactccaacggagataacgtgaatattacccagctgtagaaaccacaacaccctgtcggaaagaaaaggaaaacaccatgaaacatcaagaagctctttagattcaacctgaaaaattacttctggcacggcttcatggaaacaggtttggggagcctagatgaaagctgcagctgagtgatatacgttgttcaatataatctgcacaacaaccattcctgcttttctgcatgtcacttctgtttttcattctgtttatattatcttcattttcttttcaaagagttctagctgattttcaaaaatatgcatttaagtatgcgtcctcaaagggaacgacatctctcctaaaagggcaaaactggagttcccgtcatggcgcagtggttaacgaattggactaggatccatgaggttgcaggttcgatccctggccttgctcagtgggttaacgatctggcgttgccgtgagctctggtgtaggtcacagacatggctcggatcccgcgttgctgtggctctggcgtaggccagcggctacagctctgattagacccctagcctgggaacctccatatgcggcaggatcggccctataagggcaacacgacaaaaaatcagagaaaaaaaaaagggcaaaacttggttcttggggaaagatgaaaaacattgtactcttttatatacaagacacatagatatacatataccatataaataaatacacactatatctgtagtattattttttttggtcttttgtctatttagggccgcacccacggcatttggaggttcccaggataggggctgaatcagctacagctgctggcctccaccacagccacagcaacaccagatctgagctgcaactgtgacctacaccacagttcacggtaatgccggccccttaacccactgagcgaggccagggatcgaacccgcgtcctcatggatgctagtcttgttcatgatgctagtcttgttcattaaccactgagccacgatgggaactcctgtagtattaatttttttggggagagtaagacaattcattttttttaatgtctaaaaggcagcccagtcccccgtatttagttcctctccaactacatcatcatcatcaccctcatcatcaccatcatcttcagcatcaccatcaccagtctcaccagcatcttcaccaccaccatcatcatccccatcattatcatcactgctatcaacctcatcattatcttcagcatcaccatcatcaccaccaccatcatcattatccccatcatcatcatcaccatcaccagtgtcatcaccaccactctttgtttcttgcgggcagaataaagagtgctaatggcagggagttcccgtggcgcagtggttaacgaatctaactaggaaccatgagattgcaggttcgatccctgggcttgctcagcgggttaaggatccgcgttgctgtgagctgtggtgtaggtggcagatgcagctcagatcccacattgctgtggctctggcgtaggccggtggctacagctccgatttgacccctgtcctgggaacctccatatgccgtgggagcagcccaagaaatggtaaaaagacaaaaaaaaaaagagtgctaatggctaatcccagtgctgacacccccaaagaaacaaggccacaattcaggatttggggtccacagtcacctgctctttctaatgaaacctgccactcaacaagtctcacaaacctaaacttccaacttccctcagtatcactaattgaaatttctcttgctctttagttattttagaggcaacagagcatcatgtttaagcatatcaactctgacatcacatgtttggtgtcaaaatctagcttcaccaattacagactgtgcggccttgggaaagttacttaatttctttgtgcctatgttttctcttatgtgtaataagggaaacaaatccactgtacaacagctgaggaaacccacacttgttgcttagaaaaggtctcctattcttagatttgaaccaatgatgaaaactcacaagacccatgaagggaacaatgacatgaaaaaagcaagaccaagaaaaactgacacctgaagaaaaagaaataaaagaacaggaaaggagttctcatcttggagcagcagaaatgaatctgactagtgtacatgaggacgtgagtttgatccctggcctcgctcagtgggttaaggatccagcgttgctgggagctgtagtgttggtcacagatgcagcttggatcctgcattgctgtggctgtggtgtaggccagcagctgttgctctgattcaacctctggcctgggaacttccataagctgtgggtgcagccctaaaaagaaaagaaagaaagaaagaaagaaaagaaataccttccctggtttcctccttctatataacccccgatcacactatacgacagcttctttcatagctcttatcacccctggaatgccccgttttatatattcttcggagcagcatagtttaggaataaaacatacagactctggaaccaggctggctttaaaaccctggctctactcccttattacataagtggtcttgggcaagttattcaatttcttttacctcatttttttctcctttgtaaaatgggactgtttcaggacccaatatcagaggaatttagtgaagactgaatatgttctctatttgaggaacttagaacagtgctaagtgagtggttgctattaccgttagtggcttcctttctgcctacctcttcctgctggtaagtcagcctcacagggcaggaactttgtctgttcactgctctatcctcagtgcctagaacggcagctggtacacggtgggtgctcagaaaatacatgccaaatgaaggactataaagaaattctttcttggcagatgaattccctgatttttatcaaagctttcctgatgaagatgtttgcagtgtccagtctagaattatgatctcttggctggatagcccaaggccctcccttttccctgcagcctatatccagtgtaatcttcccccggactccctagtcagcctcatactcaccccaaaagagaaggaaactgaagctccacatcttgctgtgtttctgtcattcgaagaggagaatcttttctctgttcccagagtttttaataacagagggtgtggagagaggggaagggcagagccagcattgctcaatgcaaccagagcatcacagccctttttgctgagttgccaccactcggaaaggacagtgtagcaaacccctaattttctcctttctccacagtgtagagaggttggtctggctggtgggtcagtgtgtggatccatctccctctctctctctctctttccttcctgctggattctttctttcttttttttttttttttaattgcagcatagttaatttacaatgtatacacatatatattctttttcagcctttccattacaggttattataagatactgagtataatttactgtgctatatagtaggtccttgttgtttatctcttttatatacagtagtgtgtatatgttaatcccaaactcctcatttatctcccccttccactttgttctttccccaccaacatctatctcccatttctcatcatcttattttattgcacccagtaataaatgagcttccaccatctatccccaatgaagcaagagcaaaactcaagggtcctttcccagttttccccgtacaataaccaccataaacctcaagtaccaggcactgtgctaaatatgtttccaagaaaatttaatttcatcgccatgtcagcatcatcaagtagggattcctacccctacctatctcatttaaaaatacaatagaatggaaattgcaactaccaaccccaagctccctgtcaactattacatttagaatggatgagctaagcaatggggtcctggctgcacagcacaaggaaatatgtccagtctcttggaatagaacatgacggaagacagtatgaaaaaaagaatgtatatacatgtatgtttgggtcactatgctgtgcagcagaaattgatacaacgctgtaaatcaactacactctaataaaaaataaagaaagaaaagttaaaaataaagatgctagaaacaaaaaagaaaaaaggaaactgaggcttggagagaagatgtgtcttgtccaagactacctggacttgagatttgaatccaggaccctctgaccccaaagactagaactttcaccattttgtttgccttcagctccccataatatctgatcactgtcggtgacactcccactccatcccccctccccaagcccaaccgaagacacacatacacatgcaacttctcataaacagggtggcctaggaatatcttagttagggtctcccagatgcagaggctgagacaaggcgtctagtgaaagcagttcatcagggaggtgaccccaaaaacgctccagctgaggatgggagaagtgagagaaggaaggaaaagagcccacaatgaatgttatccagtaagttacccagtaaaaaactgaaactgaaacagaggttgaggacatctgtgctatgtagtaggtccttgttgtttctctcgtttatatgtaattgtgtgtatatgttaatcccaaactacctaagagacagcctaaagcaccctcttcagacttatcccaaacgaggcgggtgagggagctggggtatttatccaccagatgctgtcggtcactgattgaggcttgtgttaacttaagacctggcctccaagcagatagaatgcgctccagaccatagccctgttgatgacaaaatgcagtggctggcagatgtcaggctagggcacccaaatcctgtgctccaagataaaacagaagggcaaagcccagccctgaggtcttgggaagaagagccccatttgttttcatattctcctttttcgctctgggcaaggcaaaatacctaccctggaattatggtcaccgaagaagattcatcaacagctccatctgtggatcaagagaccctatccagtgaagctgcagctaagaacgagcacgaaaatacagcaaagccctccaagaaggaggataaacagagctgtgttacatttaagagacacactggtggatcaacacagaccctagcaccagatcgcaggggatttaaatcccgactccaccacttgctagtcatatgcggtcctgggcaacttcttaatgtctctatgcctcaacattcccatctgtaaaatggggctgataaaaggagaatctatttcatggagttaagatgagcatcagaggagtgggtatatatctcacgcttagaaccaagcctggcacatagagaaaactccaagatgtggctattactcaaattctttgatatttctcccttccagagggggaacccagtttttctctccttgaatatgagctggactcagtgacttgcttccaaggaacaggaaaaggaagatgtgacgtgtggcctctgaaacatctgaaagtcattgtggcttccccctcgctcttactttccaggatcattcagttgggggaagctagttatcgtattgtgagttcactcaagcagcgtgatagagaagccctcatgaggaggaactgagattccagccaaaaccttgactgtgacctcataagacactctgatccagccccacccagctaagccacctctagattcctgaccctcagaaactgtaagaaaataaaagtttgttgtttgaagctgttacatttggaggagagatgtgttacactgcaggagataactgatacgcttagaaccaattgtccttgtcaattaaaaaaaggataacaataacatcataagagtttgaggtttgctggaataaaaccttaaagttctacctggcaaaataatgcccactaatatcagtaattcttgttattattattatcccattaggctaagtggtcacagctactcattggcatctgttcctgggtaccagcaaggacagaagtcagcaacccatttcatgcaagaccatctaatgtgggtgagaaagtttagactttctctgctgggcaataaagggatttcagcaaaggagtaaccatcctgttggtagtttacaacactcgtgttgtgtagacaggatgtggtcatgggtggggagatggggagaagaacatagcgacaagctcgtctagggcacgggttgtggagacagagaggaatttaggaagcaggaaaagcagaatggggggaatgcatgcatgtgggtgggggagtctaaagcagaaggaggaattgacctctggacattgggctacagaattgaaagttcttcccatccggcccaggctccttctcggggtgggatgggatgggatgaaatggtggaggagttttcccgctactgccaaaacaaatcgccacaaacatatggcttgaaacaatacaaatgcaatacacgacaggtcgggaggtcagggtccccgatgagtcttaggaggctgaaatcaagatatccatgggggctcctagaggctctggggagaagtccattccctgtctttgacagcttctggaggatgcccatattccttcgcattccaaagccccttcctccatctgcacaggcggtgtagtatctcaaaatctctctcctctccctctctctctccttctccctctttctccctctctttcactctctctcccttcctccctccttccctctctccctctctttctctccctccctccctcctctccctctctcacacatacacacatacaaacacacacacatttgctccatggatggatggatggataggtaggtggattggtgggtgggtaagatatagatggatcaatggatgaataaacaggtaagtagatgtgtgtattatgctttgatagagagagagagagattgctctcattctctagatacatttctctcattctctctatcctcaatttctctctctcccccacctctccctcccctttcctctctgaccctccctccgctcccttaaaaggactttgtgattccattagacctactcagataatccgcaataatctcctatctcaaaatctttaacttcactgcacttgcaaagcccccttggcagtgtaaggtatatatgtacagctttccaggagtgggatatggacaacctggtgggaattagggggaatttcattattctacctactgaaggtggggtctggggtcctggtgcgtgactgaggatggcaagatgccagtcacccttcaaatccaaaagaggtgaccaaggctatgaactctggaccacagagatcctccaggatgagggcaggtagcaggcgtgaggggagaaaaaagggaaggaaatgcacaattggagccacatggcttgcagaagcctaaccccttgtgactttcccagcaaagaggaaattgagagatactcaagaagtcatctgagggtgtaataggaaagaacaaatctgactccatattagacctgttccttttactttaacctttgtgtcctgttgttttccctgaaagaatgttacctagagcctgaaattcatcccccagcctgcatagtctcaagcctctgacctttaagagtataacacgtttccattcacatagagataaaaagttgcagaacagagaattacatttgttttgttggaaccttacaggaacatcggtgacctgacctatgcagacaaaggactcctgtaccaagaaggctgcgacaaccaacctgccctgccccacttcccctggcctttaaaaatgctctgctgggtattcccattgtggctcagtggtagcaaacgtaactagtatccttgaggactctggggttcgatcccccaggcctcacttagtgtgttaaaggatccagcgttgctgtgagctgtgggataggttgcagatgcagctcagatcctgcgttgttgtggcaaaggctggctgctatagcttggattcaactcctagcctgggaacttccatgtgccctgggttccgcctgtggaaagtaacataatgtcttttctatcaaaggaaatcttggttactccattttgctcaggtttcaccttcctgcgaccccccccacccctcccctttccctcttctcccaataacaatttgtttcaaattagccagccgggaagaatgtgcaccctgacctgaccaatgggaaggggacaggtacatcacctgcgttagggataaataggggagggtcctttgttcggggcgcacactttttggagtggctgtgcccttctgcagaagtaaagagccttgtcgagatttctccttgtccatgtgtctcactttctgacactgacgacccagcccgagctagagttattggaatttccaacaggccttaaaaaaaaaaaaaaaaaaaaaaaaaaagacaataaacatgctttgctgaaaccctttgggaagttccgggtttggcagtggcggggggaggtgcatgagggcccttcccctccagcccccgcccaagtctccttgcacagccctgcaataaacctctctctgctcccaactcccctgttttgtatagtttggccgcactgagcaacaggcacatgatctgagttcggtaacagagaagcccggccccagagcatccctgggttcatgcttaatgagggtgttggaggaagggcggctcctgggaagccctccctacccaactggaccgtgttcctctctcgttccctctaaaccctcccctggctccctgtgaccttcgggatgaagtccagtctcattaatacgacactcaagacctcactgagtcttatactggtgcccttcttccttattgccccccctcacaagtcccagtcatcccaaatgaacctgcagtgcacactgtcgctgacctgtccagccatccttcagctactggagcaccatccccccgctgctgcgggtgttgcctgctaacagttcacagcttccccttctccagagaacgttccagttcaatgcctgcataaaccctcaggcccatcctgcagccaataagcaatgggcacaggggtcaaaagccagcgttcaccccaaggtgacttcaacttagtggtgttattcaggctccgggtgttggaaattacagtaactctggctccggttgtcagtgttggaaagtgagacacatggacaaggagaaatctcgacaaggctctttacttctgcagaagggcacagccactccaaaaagtgtgcgccccgaacaaaggaccctcccctatttatccctaacgcaggtgatgtacctgtccccttcccattggtcaggtcagggtgcacattcttcccggctggctaatttgaaacaaattgttattgggagaagagggaaaggggaggggtggggggggtcgcaggaaggtgaaacctgagcaaaatggagtaaccaagatttcctttgatagaaaagacattatgttactttccacactacccttcctcatcctctgctaaatgtcctctctcaataaaccctgaaacaaacatcctcagggcagagtctgtttccagggggacctaagaatccctcccagccattaaactctaagctgtctcttgacctcaggttgcacatgggtactcactccatattgtaggcttccttcccatgtcaatatcacctcctcttccgtgccttcctttgtcaatctcaccgcctctaggaagccttcccacaaaaatatcacctcccccagggagccttcccatgtaaaatcacctcctccaggaagccttcccatagaaatatcacctccagaaagccctccctgacctctccttcaggattagggacttcttctatgctttcctaatcccaacacttaatatgatctttgcttgtttctggatttgggggtgggggtatgcttgcttttggttttttctggggtttttggccgcacctgctgcatacggaagttctcaagctaggggtcaaatcagggctgcagctgtcagcctacaccacagccacagcaacgccagatccgagccacatctgcgacctacaccacagctcatggcaacaccagatccttaacccactgaacgaggccagggattgaacctgcagcctcatggatgctagttggatttgtttcctctgggccacaacaggaactcctgaaaaaactaaaaatcttaaaaaaaaaaaaaaagaaagaaagaaagaaccaatgaggaaaaagaagaaggaactgaagaatctcctgacatccccccctaagccctcagaaccaagaccaagaatgtaaggggatggccgatgggcagccactgccctccccctggaaggaaggaacacgagttctgcaaggggcagcacttgctgaggggcagagtcccagcttgctgggaaggatgcatagttatccaggctcctaagacccctggcaagtggagagggggggttgttgaaattcccctagaaccacacccaggtcaaagattccccaggatggctacacaactcagtgcatagccatcctcaggctgctttattacagcgaaaagatacaaagcaaagacacagaggaaaccaaaaatgaggaaagggttgaaatacatacaagcttccagcggagaggttcccaggagaatggaagaagcagcccccatccatcaattccttttgctgcgctgatctcggtatgagactccgaccccaaccatcctctcccgttgtgtgatttttttcctttcccctataattttccctgccatgccacccctcccccaaattgtgtgaccttcctttcattgtccttgccacaagttcccaccatgaccctttacaagagtaacatctcaggcgttcccgtcgtggctcagtggctaacgaatccgactaggaaccatgaggttgagggtttgatccctggtcttgcccagtgggttaaggatccggcgttgccgtgaactgtggtgtaggttgcagacgcagctcagatcctgcgttgctgtggctgtggtgtaggctggcggctatagctccgatgcaacccttagcctaggaacctccatatgccgcgggagcagccctgaaatgacaaaaagaaaaacactaaagtctcctcacagttggagctgctactctcttgagctcagccctttggttccggaggccctaataaatctctcttcttgactgacttggccttgggcgttcttccttcgagcaaacctaacaccagggtggcctggaaccagaggggcagggcgggagggatcacaagagagctccagaaaatttagggaaacaatggaaatgttccgtatcttgagtgtggccaaggttgccaaactcatccaatttttacactgagaaacgaagcagtttgttgtatgtaagtcaccctctcgtaaaatggataagcttggctccaaaataaaagaggacccagcattccatcaaattattttcttgtgcgtgccacatgaaaggacccagttgtgttattgtgcaggcaatatataaagggaccagtttattttatgctatataaaagggaacaaaagatgggcattttgagtttctccagggaggtgtgggctcttttacatttaaacatttgggttttttcgttttgttttttttttttttttgcttttcagggccacaccggcggcatatggaggttcccaggctaggggttatttcagagctacagctgccagcctacaccacagccacagcaacaccagatccgagccgcatctgcgatctacacccgacagctcacagcaacactggatccttaacccactgagtgaggccagggattgaacccacgacctcatgtttcctagtcggattcgtttccactgcaccatgatgggaactcctaaacatttgtttaaatggatagcttatcttattccacaataataaatacatttgaccttaagaagcttaggaatgatctaaatctatacttccttcaaaattaaaatgaaaccaaaaaaaaaaaaaaaactagtacagttcacatttcctaactgcaccctgacagataagaaatgtttcttagaataatgccatttgcagcaatatgggtggacctagagattatcatactaagtgaagttagtcagagaaaaacaaatgtcatatgatatcacttgtggaatctcaaaaaatgatacagaaaattccttcgtgattcagcaggttaaggacccagcattgccacagctctggcatgggtttgaaccctagcccggcgaactctgcatgctgtagttgctgcaaaaaaaaaaaaaaaaaaaaaaaaaaaattaattaaaagaatattttaaataaagtgttaaatgatataaattaacttatttacaaagcagaaatagactcactgacatagaaaacaaatttatagttaccaaaggggatagtgggggtaggggggagataaattagaagtttaagggttaacatatacacatcactatatataaaatagatcagcaacgaagacctactgtataacttaaactatattcaacatcttgtcataacctataatggaacagaatctgaaaaaggatatataaacatattatataagtgaatcactttactgtacacttgagactaacacaacgttgcagattaactatacctcaatattttaatttcactcacataccctgccctgggacttactaactctgacgaaggcatccacaggtgatattggtggacatatttcaaacacagccaggcagatatggcattgaatcaaacaggggcctttataaacatctctttctctctttataaacatctctttctctctctctctccacccccccaacacactctcaaacacgcgagagcgctttccaacgcagatagcaccaaagtaaagccaagcttgccctctggtggacagtatcagtagtgtcccaaactgctgggctgatacttggatcccagcttggtgaaagaagtagagagagagagagaaagagagggagagagagaaagaaaggtgtatctgtgcacctgagtttgttcacaagcctatatatatgagcccatatttgggcaccataaagggcccctgatgcttatggctttgtagcatcctcacactgcccagtggtatctcccattcattcacccaaaagcacagagaagggacttatagagtcatttcagagtcttgttggacacaagcagtcatagcctcatgtagccaggatggggcaagaggtagaaacacagagctggaggaagctagagggagagtttggatctaagtctctgaagggtaaacatgggcctatactgttgcaaaggcagagaaacctattgtagatggagtgggctctactcaaagccttttactgtagcacaaagcctcttcttaattctttaatcccttccagagggctaggtttgggctgttgagttagtacttggtatcttctagaagagaaatgagtgagccaaagaaatgactctctaatggtggaatgacaatgaagtcaggcatagggcagattttctttctttttaaaaacagttttttgaggtaagactgaaacatacaaattgtacatattgagtgtatacatagcgataagtttggggatacacatccacttgtgagaccatcaccaccatcaaggccgtaaacatacccatcacttctcaaagtttccttctgcagtggattttcattttggggtcccatcacatttcatggggactgttgacttgaggaaagtctgttctcagggagccagcactcctgtttgagttgcgggggagtgtctcaggtcccatgaaatattttccccgctgcctccaaactcatcagtttgaagctgtgtgctgctctctagtggccaccgctcatttggctctaagctttccgcatagattgttctgggaccagactgaaagcgcaggctccaagtcaggcttacaactttgagccttaaattgcaggaggtggggagccatggattaaggagacttaatcagtggacaatttgaggttttaatcagtgtggccatttcacacttgacctggcagatttccattcattagtatcatcacttggtctccagtctctcccatttccaatctattctgcaaaagcacaacccaagtcatatagtccaggcagcagattgaatccttaggatgacccacagggacttatgtaatttgcatcctcctcttgatctggctgcactgacctctggaagcaggaaagggcagaagaaaaagctgagcaaatatgcgggctcagcttgagtttacttagaattagtttcatggcgaaaattagtgtagaggagcaaggtagagagtatcttgatggtggtgggtggttattattgactatgtggtcagagaagccatcttggacatttgagctgagaccttgagtgaatggagagagtgcccagggaaaaggggggaggagaaaatgtgtgttaaggcagagggaatagcaggtgccaaggctctgaggaggctgttgagtcagtaccctgtattttctggaagagaaattatttagcaaaagaaatgactctctaataatggaattttgggcaatgaagtgagacaaggaacagattttctttttctgttaaaaaccattnnnnnnnnnnnnnnnnnnnnnnnnnnnnnnnnnnnnnnnnnnnnnnnnnnnnnnnnnnnnnnnnnnnnnnnnnnnnnnnnnnnnnnnnnnnnnnnnnnnnccagcccgccccgggccctgggaggggaagccacccgaacgcctcaaacctttgctctggaagccccaggaatttttccccctctcctagccgggatatatgacccctcctctttctggggtggtggtaatcctgggttcctgggcgccctggggtaactagatagcccctcgtgccaactctgggatttcttttggaggtgcagtggagtcagtgagggaaaccaagtcacccctcgggggggacccgcggaagcatggcgaccgggagaacctggtgcctgctctctggccgttctgggggccccccaagctgcggggaaccctgtccctctggccctgactcacgccgggccggccggattttccggaatctgggggggattaggggagccggggcagggggagtggccttgccccattccacacccctgttggacgtctggagaggggacactgtagtccggctggggccccgcccctgttccctggcccttcctgggaaggggagggggttcccgccggtttcctgcttccccccaccccacgccgctccggggcggggccgggaagccactccttctgggagctcagagcttggaggctcccctgggccaggtcagcgggctgtggggtcccaaagtcttgatcccggtcctcccaatcccccgctaggatcagtttgaggtgcttgagcggcacacgcaatggggtctggacctgttggacagatatgtgaagttcgtgaaagagcggacggaggtggagcaggcttatgcaaagcagctgcggtgagaccctagggtggccgcgccctgggcttcgggggagcggttggagggctgggggctcagtcttcctgcctctctccgtaggagcctggtgaaaaaatatctgcccaagagacctgccaaagatgaccctgaatccaagtaagaatgaagaggggaggcagagttagatttgggaggactggggtattggatccttttcctctccctccatttgggccacccaagcactcctggcttctccacccagttccacttagaggtatgagctgggaaccaggaaccgtattacctgggttggaattcaaaatccactactttctagctgaactgctttgggcagttgactccagttctccgcctccatttttcttgcctattaaatgggagaggctccaacagttattaaatgaatgactctgagcaagtgacttaagttttgtgcctctgtcttcctcactgtgaactggggatgatgatcacaatactgatcataatgataatgaccttgtaggggctcatttgaagattaagataatgtgttaaaacaatgcccagcccatttcactttattccaagcccccagttccagaatccccaaagctctaagaatcagaagcttttctgggcacctatccagaggcaacctctgacctgaactaatttgacattaattacattaattgcgttcttggtttttatcccactgagtgtgaatgttaatacttatcattgagagttcccgttgtggctcagcaggttaagaatctgactagtatccatgaggatatgggtcagatccctgacctttctcagtgggttaaagccctgtgttgccatgagctgtggtgtaggtcacagatggggcttggatcctgcattgctctggctggggtgtaaggcctgcagctgcagctccaatttgacccctagcctgggaacttccatatgcctcaggtacagccctaaaaagagaagaaaaaaaatctcatacaaaaatgtttattagatgctgccactaacaccactagggtaatgtgaaaagtgatataagcatcatatcccccttctgaacccccctcaaaatcctgagaattctgagttccccctcagcgggtggggataagggagattggttagaatttatcattgcttctgggtgaatgttttggagcttacactcttctggggcatatggcttccaagggccctgacccctagcccctgcccccttccccccaccccaggttcagccagcagcagtcctttgtgcagcttctccaggaggtgaatgattttgcaggccagcgggagctggtggctgagaacctcagtgtccaagtatgtctcgagctggccaagtattcgcaggagatgaagcaggagagaaagatggtaggtgatgccctccttgggacttccccagggccctggccaccaggctgagccttattacccccttctttctgtagcacttccaagaaggccgccgggctcagcagcagctggaaagtggcttcaagcagctggagaatgtgagtttgtgcatggggagaagaggggcacccctgagcagtggggtgagggtggctgatccatggaggtacccccttggtctggcctggtcccccaccttcattgtgggtttccccctccatgtgctgggtgacttcccacctgtccctgaaaccttagttggtggctccttcatgccggtcctgtcctctacacagagtaagcgtaaatttgagcgggactgccgggaggcagagaaggcagcccagacagctgagcggctggaccaagatatcaacgccaccaaggctgatgtggaaaaggtgcttgtgcggtctgaggcaggcttgggggggggggggggcagggcccgaacctggcagtgacccctgctttcatattcctcaggccaagcaacaagcccaccttcggagtcacatggcaaaagaaagcaaaaatgagtatgcggcccaactccagcgcttcaaccgagaccaggctcacttctatttttcccaaatgccccaaatattcgatgtgagtattcaaaacccacagccccacctcctccccaaattctaaaattaaccaactcctacacatttgttgaaaccccagctgcaatgccctaatctctaaattgaaagagaattagaaatgaagagtcacagtgcactctgccttttctcaagctattcgttctgcccgggttgtctttctttccttttaaaacttccatttattctttcaagccccatcaattaacccctnnnnnnnnnnnnnnnnnnnnnnnnnnnnnnnnnnnnnnnnnnnnnnnnnnnnnnnnnnnnnnnnnnnnnnnnnnnnnnnnnnnnnnnnnnnnnnnnnnnnttcctgccttctttgaaatcacctccgttaactatacctgactcccatgagtgattctgccatgcacatgtccaatctctctctctccccacagtagataatcaattccaggagaacaagtatttgggcctgtatttctcactgctgcatcctccatccctagaatctgggcgggcatacagtaggtgctcaacaagtatttttgaatgagtgcatgaatgaacgaagaaatgaatgaatgattattggcttcagctttgcaactgaactcagctgagactcactcgaacgcctctcccacgaatgctgtctgtgaaaacagataggacctgattcccccacagacccctgcacctacctctacacatctgtcccgggccctggacactcgtctttcccctgctggattcaaatccgggcttgcagacacaagagtagctccccacactgtttcggcaaatcgcgtgctctgggcaagttttgggattggcacattcatttacatctagtgaatgggaatgaaaacccgggtcaaggcagaggaaacagtgaggacaggaagctgcgaacaggacattcatctcacccacaagggtaggagcgaagcattcgagggacggaacccccgttaccctcaattactgccttatctactgcttagctcctaatagaccctcaacaagaattcaaatccaagtttctctacttgatagttatctatccttatgcaagggactgtacctctctgggcctcaatttaatcatttctaaaatcaagatcatagacgctacccataagatcatcacatattacctgtacagatgaaacgacctttctttcccaagatccagttgtttccagtgggagatgagaaaccagtcaaacagctgcacctgtacctccctggcaggtcttgcagattgagtgaggaccacatactggggggctttgagaacactcatctatatctggacaggaaaagagagtcatagttgccaatatgctccttcatgtacaacagattgtatttttcaaagagcttgaaacactgtcttccatcccatgtgacctgcatgcaatgtcctttaactggtacactttccatcaagcagtgggtctatatttccttcccttgaatctgagtatggtggtggggacattaggtcatcaaaataccatggtaaatcatcaaaatatcatacacttccaccttgttctcttgagatgctcatgcttggctcagccgccatactgtgaggaagccttgcaagtcatgaaaaaccagctcacacggtaagattaagacttcccactcacagccctggagcagccaaccaatagccagcaccatcttgaagccacaggagtgagcccccttcaaagagaatcctctagcccccagttgagccaacacaactcacactgtggggaacagagttgagccattctcacccaactcagcccaaatagcagatttatttgtgagcaaaataaatgattgttgctgtcttaatgtaccaacaccaatagataaccagaacttttgcaaacccacttctaggaatttactcattggcgcacccatagaattgtgcagccattgtaccatggggtgggcctccccaaatctccttcagccctgctctgccaagtcatcctaagtaaacatttgctttgaagttgctggacaaatacaacttcaaggcaagcgccctatagctctcttccaggaaaatgcacctctccaagagagaaatctggacctgccacatgcatcaagataagatcacagggatattcttcccagttttaagtaatggaacattaaacatctaaatgtctgttgataataggatgattaaatcaggagttgacataaagaataatgtagcatgttccttcatttgagaaatatctattgaatattcacagtgtcttaggtaccatattgggagtcaaagacatgcagtggacaaggtccttaccatagtatccatcattttctagttggggcatgttgattctacctgtattttattttattttttgctttttatggccacacccacagcatatggaggttcccaggctaggggtcgaatcagagctacagctgctggcctacaccacagccacagcaacgccagatccaagccacgtctgtgacctacaccacagctcacggcaacactggatccttcacccactgagcaaggccagggatcaaacccacaaccacatggttcctagtcatataatttctgctgttccatgacaggaactcctgatcctacctgtattttaaaacgagggaccaaaaagactactgtgctcactgaataatccatgaacgatagcccaaaggtttaaaaaaggatgtttggagctccctaggaaatatagtaatagatattaaatcatcttattcagagattatcaaactacagcccaagtgtgaaatctggcccactacttgtttgtgtaaataaagttttattggaacacagccacatccattcatttatgcattatctctggatgcttttgcattacaactggagtgttgaataatcaagacctccatatcatatggcctgcaacctccaaaatgtttactatctggccccttgcagaaaaattttgcggatccctggtcttattcagaaacatagtcagatcttcactgttaaaaggaagtttgggtctaaatataaggaatacatatcaaaaactagctcattctgggtattattttagcttatattctttatgttaactgtagctcttggcactctacatgtgccaagcaggttgtatacattattgcatttaattttcccaactatcatttaaggtaaatacttctttctctctctctctctccctctcggccaccctgtgccatatggagttccttcgtcagatcccagccacagttgcaactcgcacagcagctgtgccacaccagatccttaacccactgtgctgggctggggactgaatttgcatcccagccctgcagagacgctgaagatccggttgcaccacagcagaacccctaaggtagatactcacatacacccattttatagatggaaatattgaggcttagagatattaatgatgtttctgcaacgctttacaactgctgtgtggcaaacaggtaatgtggtttggagaccgccattagagtcggaaagtcccgggtttgcattccaatttaactgcatgactctgaacacatcacttcagatatccaagcctcaggcttctcatctgtacaatggaggtcctagcaatgcctatgctcaatgtcatgtgaacaggcacataaagcccttcacacagggcctggcactccgtacaggttaggaattcatattattcacatggaaggaaatcaatgtctatttggggatattggcaaatagcatctttttcttttttttctaatgcaagtctctaatcgcaagaatttttgctggccaggtatcatttctcataatcaaaacgcgttgtcccgggctaaatgtctgcaccagactgnnnnaccnnnnnnnnnnnnnnnnnnnnnnnnnnnnnnnnnnnnnnnnnnnnnnnnnnnnnnnnnnnnnnnnnnnnnnnnnnnnnnnnnnnnnnnnnnnnnnnnnnnnagaagccgagagccgggtcctaagcaaccgaggggacaccctgggccggcacactcggcccccagaccccccagccagcgccccgccagacagcagcagcagcaacaacggatcacaggataacaaggagaggtgagcagggaggccagagtgtgtgtctgcatccaggcccaggagtgatggggaggggtcctgtcctcaccggctttgccctctccaaccagctctgaagagccccctgcagaggagggtcaggatgctcccatctacacggagtttgatgaggattttgaagaggagcccgcatcgcccataggccactgtgtggccatctaccactttgaaggtaaggacagcctgggtggcgcatcggtggcttcggggatagcatttttggctaggctctgtttaggttcaccttgagcagatctgagcccaccgccacccccaccccatgacagggtccagcgagggcaccatctccatggccgagggcgaggaccttagtctcatggaagaggacaaaggtgacggctggacccgggtcaggcggaaacagggaggtgagggctatgtgcccacctcctacctccgtgtcacgctcaactgaaccctgccagaggcgggaagagggggggctgttggctgctgcttctgggccacggggggccccaggacctacgcactttatttctgcccccgtggcttcggctgagacctgtgtaacctgctgccctcccccccaccctgccccggagcccccactcaagggacccactgtgccttccaccatcgatgtacatactcatgtttcccatcttttcttcctgccactcggctggggccgttttgttttatataaaacaattatgaaaagctcttacagtctgtgtcctattacgagattctgatactggggctggagattcaaacaccaccctcccgacaggtggcaccaggaaggaggaagggaaggcgaacttgggcacacgttggcatcccctgtcccttcctggggggttgggtgtgttgatagggaggagggtgccagatgtcacccctttggtgttctgctatagctcactgagaacaggtcacacctgttgagcccctactgtgtgccaggcattttccacccatgatctcattcaaacgctgagctttaatccccatgacaacccctggaaagtacacagtctcacttttatgttgaaggcggggatagagagagaggtcaagtgatctgctggaagtcacacagcatttaaaatggatttaaactctggcctcttacagatctgcgagttctctttaacattcaaagcctcacattcaccacttgtgggatatgttgaggggggtgtgggcatggggtggtgagaaagggcgttcagaacctccagatgtcgggtcttctcatatggggaagtaggctgccctcccttaggattcgtgctcagttttagggtgcagggtgcgttcttgcaaaccaggacccgtcccttctgtgaggctgggtgcaggtcccactgcatttggctgcctgaggacactggggatccctggaagactgggtatcgccgcgtgaagaagtggatctgtgctttcaaaggtcaggctccaggcgctgcgacaggacactgaggacgtgctggaacttgtcgaaacgtgtgacccacggtgccccagcccctctgcttccccagagcagcctccgcaagaaaccggtggtcagggcctctttcagctcagggttgggctggaatcctgggggcggagccaggttagctggaggcgtggccaggcacctgccttaccctctgataactgcctggtccccttgggactttgacccagcaggggccaggagggattctgtcccaggttatctgaactgctgggcaaggttagcggggagggggctcctgggtctctgcagggagtggggtgggggtggctaacgggcccagtggaagcgggctctgccaggagtgcatgggagcagtctgctccaggtgcaagacctggtggccccaccttagggcttgtgcctggagatggagctgccccggggggcgggacttggggtccaggctaccctacgcgacaaacgcccagggggtgggggtggagttgggcctagttggagggagaagagtgctaagtgaaggcaggaactacccaggtgggagattctggaagctgggctgccccagagaggtgtggctctgagctcagagggagagcagtaccatcaggttgaaggactgaatcattttggggggatcgagatcctctgggggcaggaccttcccaagtgtgagagagtgggactctgcgggcgtggctctggggggatagggccgccctttaggggcggacggcaccatctggtctattgcagcatgcttgagtcgagaaacacccacccagggcggggccgtctcaatttgggtggggccctcagtttgggaggtgtagcgggaggctctagtccctgggccggtgggtttgggggtgccgggctacagcatacggcgtgttcttaaagtcaggatcctctggcagccgggcgcagatggggcgctcacctcgcaggcgccgggctgtcgcctcgcggaatctgggcgcgtcccgggccgtctgacgcgcccggtccagggtgcgcagcagccgctcgcagctctcgtccaagggccccgggacttcctcgccctccagcaggcgcaccacgggtgccacgtgcggcagcgccacctcgcccgggtcgcaaggtcctgttggggtaagggtctgggctgggctaggggcagagggtgggtcctagggtgaagagggtgcgccatacattgggccgaaacaccctaggacaaaagcaaggggtggagtttgggtcagatacgaagtcttgagcaggaccgagtcaggggaggggcccagggaaggggcggagcctaggagatagtgagggcggggcctagggatctggtcctggacctagcttcgcacagagggcgggggctagggcgagggggcggggccttggacccaaacagccagctgaatgtagggcggaggtggagcaaaggacagaaacaaggggtggattttggttggaaagagacccagaggccagagagcctagcaaagagctggatgggagacagggaccaggcctaaggcgcggagtggggtactaaaacccccgcggggcttagaaccggattgaggtcctgattagagttaccacttatctaaagatgccactcaccggtgccctcatccagcgtccgcattagaggcttcagctcctgctcgaaggccagcgcagcctccgtgtggctcctccggagctggcgccacgtgcgttccaaccgcgacacctggaagaagagacccgagcccgccttctctccactcttccccttcacttgctctctggcctcgtcccgcatccctgcttcctacgcacctggggcatgagcaaggcgcccatgaccgcagccagtccaggcaggtcccccgccgcccctggccgcagcgccagagccagctccaccaggcccttcagggcggcggcgcgctcctccagcggtcccgcgcagcccagcactgccagcgcccccgccaacgccagcgtctcgagcctgcagaggcggagggcaaggttttggaggcagtggcggggtttgcgatgtgggggtgaggagggagagcaggtgacacagctcatctcccctcctccctggggggccgtgaatgggggggaggttgaggaccctagggattttaggtggctgccttacctctccagcagttccaacctcaggcgatgtccatggggaagagtgagcagctccagaccagaggcaacccccatggcgccccgctgagccttggtcacccccaggaggcctgtctcctggcagtgggggaggggtaagagtagggagttcagaggagcagaatgagtaaatgggtatgaggtgagactgggccatgccctggcttcagccctacctggtaggggacccacctggcagtccaccaatagcaggtggagggcagtgctcccaggatggtgctccaggaacaggccacggagaatgcgcagggctttaggttccagaggccgattctgggggcccagcaggcaggaggggttgtcagggggacagaaagagacctcaccctgtggtcttgcaaaacatctttgctcctcctcctcttcctcttcattggcctcccaccatggtgcctctggctctgggcagctgtggccagggggtgttccatggaccctaggcactcggggcaccagctcacagtacgttggggagcgtccagaggcatcaggcagcatcagtgaaggtgttcgaggtggcttggttggtgccttggcatgaagctgcccatcggaggccctcaggttgtcagcaatggaccccaggagagctggggtctttagcaacacagggtcacttcctgtccgaggcaatgcagatgcgggcacagtggaggctcctgggggtcacacaagagagggtaaaagaggtccacagagaaaatagctggttggggctttgtggggtaccaacctccaggttcattcactcgttcagccaataaccaggtaccccacctaacctggcgcagctttggacttgaacgacttcaccaaaactcctctagcccatatggagttttgcaaattctgaatgctaaattttaaatttgaattctttgttcttgcccctcggttcctgcattgctatagctgtggcataagccagcagctacagctctgattcagcccctagcctcggaacctccatatgccgtgggtgtggccctaaaaagcaaaaataaataaataaatactcccgtctccatactccttactctgttctactttagtttttgccccaaagcatacataattgactaatttttgttgttcatggtccttcttcctctaaaaggatgttggctccaccagcgcagggatctgtgtcattcttgttcattgatgttatcacagcacttcatacagtctcaggcatgtcacgagactttgggtggagggcagggctgacaaggcagtcaggacacaaaggggactcttcctttatgtaggattatcagggtcggctgctctgatgaactcatgttagatgagaaggagtcagtcaggtaaaggtagggaatgagctttttccagtggtgagaatagcaagtgcaaaggccctgaggccggaacatattcggcaggttccagcaactgtaaaaaagactgtgtgattgacgtgaagaggggatgtagcaggagttattaggtcagccatggttagagcatatagggctccttggaataataacaaacccacattttattttcttcttcttatttttggccacacccacagcatgcagaagttctggggccagggatggaacctgtgccacagcagagacctgagccgcagcagtgacaatgccagatccttaacttgagccaatagggaactctggaactccataaacacatatttttttttaaatttttttacaaagttcctgtgtgtttttaaattactgtgacaacatgaagagtattaccatcccttttttccaaaaggttaagtcccctgcccaaggttccttaggtatagcctggcagagccgtccctgagctctgtgctgcctgggaagccccttacctggtccagggtggtcttctgttgggtgccccacatgctcc

SEQ ID NO: 27 - DNA, 5127 bp, Sus scrofa
ctcacttccccccccacccccgtcctttccctctgtccctttgtccctccaccgtccctccatcatggggtccacctcgggtcccaggctgctgctgctgctcctgaccagcctccccctagccctgggggatcccatttacaccataatcacccccaacgtcctgcgtctggagagtgaggagatggtggtgttggaggcccacgaagggcaaggggatattcgggtttcggtcaccgtccatgacttcccggccaagagacaggtgctgtccagcgagaccacgacgctgaacaacgccaacaactacctgagcaccgtcaacatcaagatcccggccagcaaggagttcaaatcagagaaggggcacaagttcgtgaccgttcaggcgctctttgggaacgtccaggtggagaaggtggtgctggtcagccttcagagcgggtacctcttcatccagacggacaagactatctacaccccaggctccacggtcctctatcggatcttcaccgttgaccacaagctgctgcccgtgggccagaccattgtcgtcaccattgagacacctgaaggcattgacatcaaacgggactccctgtcatcccacaaccagtttggcatcttggctttgtcttggaacatcccagagctggtcaacatggggcagtggaagatccgagcccactatgaggatgctccccagcaagtcttctctgctgagtttgaggtgaaggaatatgtgctgcccagttttgaggtccaagtggagccttcagagaaattctactacatcgatgacccaaatggcctaactgtcaacatcattgccaggttcttgtacggggagagtgtggatggaacagctttcgtcatctttggggtccaggacggtgaccagaggatttcattgtctcagtccctcacccgtgttccgatcattgatgggacgggggaagccacgctgagccaaggggtcttgctgaatggagtacattattccagtgtcaatgacttggtgggaaaatccatatatgtatctgtcactgtcattctgaactcaggcagcgacatggtggaggcagagcgcaccgggatccccatcgtgacctccccctatcagatccacttcaccaagacccccaagttcttcaaacccgccatgcccttcgacctcatggtgtatgtgacgaaccccgacggctcccctgcccgccacatcccggtggtgactgaggacttcaaagtgaggtccttaacccaggaggacggtgttgccaaactgagcatcaacacacccgacaaccggaattccctgcccatcaccgtacgcactgagaaggacggtatcccagctgcacggcaagcgtccaagaccatgcacgtcctaccctacaacacccagggtaactccaagaactacctccacctctcgttgccccgcgtggagctcaagccaggggagaatctcaatgttaacttccacctgcgcacggaccccggctaccaagacaagatccgatactttacctacctgatcatgaacaagggcaagctgttgaaggtgggacgccagccgcgcgagtctggccaggtcgtggtggtgctgcccttgaccatcacgacggacttcatcccttccttccgcctggtggcttattacaccctgattgctgccaatggccagagggaggtggtggccgattccgtatgggtggatgtcaaggactcatgtgtgggcacgctggtggtaaaaggtggcgggaagcaagacaagcagcatcggcctgggcaacagatgaccctggagatccagggtgagcgaggggcccgagtggggctggtggccgtggacaagggcgtgtttgtgctgaataagaaaaacaaattgacccagcgtaggatctgggatgtcgtggagaaggcagacattggttgcacaccaggcagtggaaaggactttgccggcgtcttcacagatgcagggctggccttcaagagcagcaagggcctacagactccccagagggcagatcttgagtgtccgaaaccagccgcccgcaaacgccgttccgtgcagctcatggagaaaaggatggacaaactgggtcagtacagcaaggacgtgcgcagatgctgtgagcatggcatgcgggacaaccccatgaagttctcgtgccagcgccgggctcagttcatccagcatggtgatgcctgcgtgaaggccttcctggactgctgcgaatacatcgcaaagttgcggcagcagcacagccgaaacaagcccctggggctggccaggagtgacctggatgaagaaataatcccagaggaagacatcatttccagaagccagttccccgagagctggctgtggaccattgaggagtttaaagaaccagacaaaaatggaatctccaccaagaccatgaatgtgtttttaaaagactccatcaccacttgggagattctggctgtgagcttgtcggacaagaaagggatctgcgtggctgacccctatgaggttgtggtgaagcaagatttcttcatcgatctgcgtctcccctactccgttgtgcgcaatgagcaggtggagatccgagctatcctctataactacagggaggcagaggatctcaaggtcagggtggaactgctctacaatccagctttctgcagcctggccaccgccaagaagcgccaccaacagactctaacggtcccagccaagtcctcagtgcccgtgccttacatcattgtgcccttgaagactggcctccaggaggtggaggtcaaggccgccgtctacaaccacttcatcagtgatggtgtcaagaagaccctgaaggtcgtgccagaaggaatgagagtcaacaaaactgtggtcactcgcacactggatccagaacataagggccaacagggagtgcaacgagaggaaatcccacctgcggatctcagcgaccaagtcccagacacggagtcagagaccaagatcctcctgcaagggaccccggtggcccagatggtagaggatgccatcgacggggaccggctgaagcacctcatccaaaccccctccggctgtggggagcagaacatgatcggcatgacgcccacagtcatcgctgtgcactacctggacagcaccgaacaatgggagaagttcggcctggagaagaggcaggaagccttggagctcatcaagaaggggtacacccagcaactggccttcagacaaaagaactcagcctttgccgccttccaggaccggctgtccagcaccctgctgacagcctatgtggtcaaggtcttcgctatggcagccaacctcatcgccatcgactcccaggtcctctgtggggccgtcaaatggctgatcctggagaagcagaagcctgatggagtcttcgaggagaatgggcccgtgatacaccaagaaatgattggtggcttcaagaacactgaggagaaagacgtgtccctgacagcctttgttctcatcgcgctgcaggaggctaaagacatctgtgaaccacaggtcaatagcctgttgcgcagcatcaataaggcaagagacttcctcgcagactactacctagaattaaaaagaccatatactgtggccattgctggttatgccctggctctatctgacaagctggatgagcccttcctcaacaaacttctgagcacagccaaagaaaggaaccgctgggaggaacctggccagaagctccacaatgtggaggccacatcctacgccctcttggctctgctggtagtcaaagactttgactctgtccctcctattgtgcgctggctcaatgagcagagatactacggaggtggctatggatctacccaggccactttcatggtgttccaagccttggcccaataccagaaggatgtccctgatcacaaggatctgaacctggatgtgtccatccacctgcccagccgcagcgctccagtcaggcatcgtatcctctgggaatctgctagccttctgcggtcagaagagacaaaagaaaatgagggattcacattaatagctgaagggaaagggcaaggcaccttgtcggtggtgaccatgtaccacggcaaggccaaaggcaaaaccacctgcaagaagtttgacctcaaggtttccatacatccagcccctgaaccagtgaagaagcctcaggaagccaagagctccatggtccttgacatctgtaccaggtaccttggaaaccaggatgccactatgtcaatcctggatatatccatgatgactggcttctctcctgatactgaagacctcaaactgctgagcactggtgtggacagatacatctctaagtatgagctgaacaaagccctctccaacaaaaacaccctcatcatctacctggacaagatctcacacaccctggaggactgtatatccttcaaagttcaccagtactttaatgtggggcttatacagcctgggtcagtcaaggtgtactcctattacaacctggatgagtcttgcacccggttctaccaccccgagaaggaggacgggatgctaaacaaactctgccacaaagaaatgtgtcgctgtgctgaggagaactgcttcatgcaccatgacgaagaggaggtcaccctggacgaccggctggaaagggcctgcgagcccggcgtggactatgtgtacaagaccagacttctcaagaaggagctgtcagatgactttgacgattacatcatggtcatcgagcagatcatcaaatcaggctccgatgaagtgcaggttggacaggagcgcaggttcatcagccacatcaaatgcagagaagccctcaaactaaaggaggggggacactaccttgtgtggggagtctcctccgacctgtggggagagaaacccaacatcagctacatcattgggaaggacacctgggtggagctgtggcctgatggtgatgtatgccaagatgaggagaaccagaaacagtgccaggacctggccaacttctctgagaacatggtcgtctttggttgccccaactgatgccactcccccacagtctacccaataaagctccagttatctttcacatttaaaaaaaaaaaaaaaaaaaaaaaaaa

SEQ ID NO: 28 - protein, 1661 aa, Sus scrofa
MGSTSGPRLLLLLLTSLPLALGDPIYTIITPNVLRLESEEMVVLEAHEGQGDIRVSVTVHDFPAKRQVLSSETTTLNNANNYLSTVNIKIPASKEFKSEKGHKFVTVQALFGNVQVEKVVLVSLQSGYLFIQTDKTIYTPGSTVLYRIFTVDHKLLPVGQTIVVTIETPEGIDIKRDSLSSHNQFGILALSWNIPELVNMGQWKIRAHYEDAPQQVFSAEFEVKEYVLPSFEVQVEPSEKFYYIDDPNGLTVNIIARFLYGESVDGTAFVIFGVQDGDQRISLSQSLTRVPIIDGTGEATLSQGVLLNGVHYSSVNDLVGKSIYVSVTVILNSGSDMVEAERTGIPIVTSPYQIHFTKTPKFFKPAMPFDLMVYVTNPDGSPARHIPVVTEDFKVRSLTQEDGVAKLSINTPDNRNSLPITVRTEKDGIPAARQASKTMHVLPYNTQGNSKNYLHLSLPRVELKPGENLNVNFHLRTDPGYQDKIRYFTYLIMNKGKLLKVGRQPRESGQVVVVLPLTITTDFIPSFRLVAYYTLIAANGQREVVADSVWVDVKDSCVGTLVVKGGGKQDKQHRPGQQMTLEIQGERGARVGLVAVDKGVFVLNKKNKLTQRRIWDVVEKADIGCTPGSGKDFAGVFTDAGLAFKSSKGLQTPQRADLECPKPAARKRRSVQLMEKRMDKLGQYSKDVRRCCEHGMRDNPMKFSCQRRAQFIQHGDACVKAFLDCCEYIAKLRQQHSRNKPLGLARSDLDEEIIPEEDIISRSQFPESWLWTIEEFKEPDKNGISTKTMNVFLKDSITTWEILAVSLSDKKGICVADPYEVVVKQDFFIDLRLPYSVVRNEQVEIRAILYNYREAEDLKVRVELLYNPAFCSLATAKKRHQQTLTVPAKSSVPVPYIIVPLKTGLQEVEVKAAVYNHFISDGVKKTLKVVPEGMRVNKTVVTRTLDPEHKGQQGVQREEIPPADLSDQVPDTESETKILLQGTPVAQMVEDAIDGDRLKHLIQTPSGCGEQNMIGMTPTVIAVHYLDSTEQWEKFGLEKRQEALELIKKGYTQQLAFRQKNSAFAAFQDRLSSTLLTAYVVKVFAMAANLIAIDSQVLCGAVKWLILEKQKPDGVFEENGPVIHQEMIGGFKNTEEKDVSLTAFVLIALQEAKDICEPQVNSLLRSINKARDFLADYYLELKRPYTVAIAGYALALSDKLDEPFLNKLLSTAKERNRWEEPGQKLHNVEATSYALLALLVVKDFDSVPPIVRWLNEQRYYGGGYGSTQATFMVFQALAQYQKDVPDHKDLNLDVSIHLPSRSAPVRHRILWESASLLRSEETKENEGFTLIAEGKGQGTLSVVTMYHGKAKGKTTCKKFDLKVSIHPAPEPVKKPQEAKSSMVLDICTRYLGNQDATMSILDISMMTGFSPDTEDLKLLSTGVDRYISKYELNKALSNKNTLIIYLDKISHTLEDCISFKVHQYFNVGLIQPGSVKVYSYYNLDESCTRFYHPEKEDGMLNKLCHKEMCRCAEENCFMHHDEEEVTLDDRLERACEPGVDYVYKTRLLKKELSDDFDDYIMVIEQIIKSGSDEVQVGQERRFISHIKCREALKLKEGGHYLVWGVSSDLWGEKPNISYIIGKDTWVELWPDGDVCQDEENQKQCQDLANFSENMVVFGCPN

SEQ ID NO: 29 - DNA, 15532 bp, Homo sapiens
gtatcatttcagtgaaggtcactccagtctttcatggaggccaaactaagggtgtaaattaggatcctcactgaagtggcgggaccctaagaggctttttcctggccccttagttgtgggttttcctgcgggcggcgcagccggtttccatcagaaccgcccagaggcggacgctgccttcctggggtgacggagcagcaggaagcgttttcggatcctggaatacgtgggcggcccgtgggaggggctgaggcgcagtttcctactcacccggatccgaatcctccgcggtgctgtttcaagagagccggattccagatcacgctccagcccggactcggaattcctgccctgcgggtctgcattttcataacgggcaggtgtgagtgccctgcagctggagaccagaagcctgaaggcagctcggccctccccagcccacagcgccgttattccgtttctatatcagtaaacacatttcattttccgtagaccagggcggggtgacgggtgatcccagtcctcgcagtgaattccgggcagcaaaattcaaaacacatgcggccaaggccgggcacggtggttcacgcctgtaatcccagcactttgggaggtcgaggcgggcgatcacctgaggtcgggagctcgagaccaacctgaccaacatggggaaatcccgtctctactaaaaatataaaattagacgggcttggtggtgaatgcctgtaatcccagctagtcgggaggctgaggcaggagaatcgcttaaaccttggaggcggaggttgcggtgagccgagatcgcgccattgcacttcagcctgggcaacaagagggaaaactccgtcgcaaaaactttcgggggcggagcggagccccgccctgggttatgtaagcgaccgcgctgggccgtttctctttcttttccggaccctgcagtggcgcctaaagtctgagagagggaagtcgcctctgtgctcgtgagtgcatggggtataaggcaagtgctgagggagaaaacgtagttgatggggtagagcagacggggttggaggtggggtggagggggagggctttggacagaagacctgggaggcttggtgggggaggggcgcccaggcctgggcactaagaaacaagtcccctggagctcaagaccatctcggcctcccctagcccaagagaggactggcttcatgactccctgaaaccatttctaaatgccttagaacaaaccttgcatattcattattgttattgaactattaaaagtcttttttgggggcgagctgaatcagatcctttgctggagctggcacacggaggaagtcctggagggagggtagacaccgtggaggtaagggcttgggacctgtgtcaggagagctaggtccatctccctcccagtctctcactaggcttatgatctttagcagtgaaaataatctctctaaggtggggaaaggaccccggtccctgctgtgctcaataaattatgaggatcaaaataaattatcagtgaatgtgaatgggaaaactaagaaattgttaaaattctcgaatacattacattttcatccacagaaaagtgtaggctagggatcatgggggaatagttagtaatgacagggatagttgaacttaaaaaaaaagtttgtgaggctgacaaagaagaaacggacacatttcctgatcttggagggttcatagggtagaagatggtagatgacagctgggtgtggtggcactcgcctgtagtcccagctactcaagaggctgtggtgggaggattgcttgagcccaggcattcaaggctgcagtgagctataatcatgccactgcattccaactgagtgacacagcaagactcctctcttaaaaaaaaaaaaaaaattcatggcagggcacaatgagtactatcaggaaggttcaaaccacgggctaaatcagtagttctaaaacttgactacacatcggaatcacctagggaactttaaaagatactaagatttaggtccaacctgggtttactgatttaacaacctaggttgtggctgtggcctgggaacatggatattaaaaactctccaggtggttctacgcagtggctaggtttgatgacctctgcctagatgtcccaacgactaagagatgtgcgttggggacaaggcaattctcttagtagaaagaggctttcgggacagcattcttattattgagaattgagaattcatatgccacacaatttatccttttaaagtgtgcagctcagtggcttctagcgtaatcacaaggttgtgccaccgtcaccactgtctaccctggaagattttttttcctttttttcttttttcttttctttttattttaaaggctagtcaagtgaaacagtgggagtgaagaagaaacaaagacatctataactggttgtgatcaattagttgtaaacactgcactcagaccagcctgggaagattttaaggatatggtgtggtctgatgggttccaaggcagaggttacaatagcctggaagagggagactgcttaggcagtggcatcctggtgggatagggtgaggagatcccagagcccacgtttactgcaaccctggggagatgtcaccagagaaatgggggtggtgccagacagcagattgtggcagctgaggttttccacggtagagtagaagcatccatcatgtgtgacattcagcagatggggcgctgtgggtggcttggagcactctggttgtaactgaggcaggcaccgtgtttaggaaggctgtgcagtaatctaggctgaagggaggggaaagcctagactaagattgtggctgtgggattgaaatagcgttgaaggagctgactttgactcccggagatgatggggaaagaggaaatcagaagggaccaaggatggtgatgttcttaagagaaactgaggaggaagagaggatgatatggtggcagacgtatagagagtctttgtagatctctcacattggaggggactatggtcggaggtacagatgtcctaaggcaggctggaaaagggagtctggagagagcttggtgttgtagtgaaccacagggagccgcctccttggccctgtgatcacccagggactgaatagagaggcggccctgggagacttcagacacttagaggatataagggggtgaaaggggggcctggctttgagtcaaagggaggagaaggagattataaagctgaaacgtctaagagagtttgtggtctgagcggttctactgcggcaggtgcttctgagaggcagaggtggctgagatctggaaacaggtctgcaaatctggtcactggtctcattgccagtaacgctgtgcgcggttgagggagtgtgttgggagaatagccacgcgttgtctgtcctggaaggaacaagccagtgagagccggtttaatggggcggccggcgaaaggggcttggtgaggcccgcgctcctcggggtgggggcgcggggatgggtggtcgcgatgccgggagggcaggcagggccctggccgtgcttatgaagttggagctgtactctcagctactcgaagctggtccctgctttaggctgcgctcccgcgtgctccccattttctgggccccaggtcccgccttctaaatctccccaggtctccagcccactggaattttctcttccaagcgtggccccgccctctccgctcgtgattggccctaagttccgggccccagtttcattggatgagcggtcgggggaccgggccaggtgactaagtttccgcggcgccttctccccggccactgcttgagccgctgagagggtggcgacgtcggggccatggggctgggcccggtctttctgcttctggctggcatcttcccttttgcacctccgggagctgctgctggtgagtggcgttcctggcggtcctcggcggagcgggagcagtgggacgtttccgggggtcgggtgggtagcggcgagcgctgtgcggtcagggcggggctcctgtgccctgtcggtggcgcagggagctggacgcggcccgttaccgccacacttcagccctgcttccccgtcacttttcagtcctcctcgggatcgcgcatcacctgcactttctggtctcctcctgctctttctctcctcgcgtctcctccgcttcctctcacttttcggacaaaccagtccttctgaggcccatgggttcccgggctgcctccggggctgctcctgtgaatggcattcgagtgcccttccagcgcggccactgaagcagccacaacccccggtgctcggggcggctctcaggtccctgaagtcctgtcctctcccggagccgacgtgttctcagctcctgggccgcagctcctggagtaggggccctcctttctcgggacccggagctggtgcttcctgctgctgtggggactgtggggggtcctgactctcaagctgaggggttggagtctgcaggctccgggcagaggattcttcctgcgacttctctcatccccagctcattctcccctcgcctctggctccgagggtcctctcctctctctcatcccacccctactaatgaccagtgatctaaggacaccagattccctctcacctcctccctgcccatctcagggcccgctgagtccttttgccctcccagctccctgctaccccttcctgtgtgctgttctctgatccatttctagggtgtcctctgccctcatcccctgtccccgccaccgaaggtccctcctgcaccccttatgggcctttcctacaagcagccttcacccagtgctgcccctatgcctccccgttcccaaatgtccctgactctaactttctggtgctgccttttatccgggggggtcttccctccatcccactcccctccagacccccaaggggaaccctgatgctaatggcagttgggccttaggcagggcgcagggcagcgcagatgccccctcccctccagtgcagatgcctgctctggaccctgcctcatggtggccccttccccactccttcatcctcagcctcaccctcttgaggaccccaccctccagcccacaggtgctggaccatccctccctggtccctccgcccctctccaccttgggaccttgtgctgctcctgtctcttgcccagctgccttgggccctcagcacgttctcatctttcagtgggaaagtgggagtgctggagcatatgacagtgctgagcatctttcccaagccccaccctcccccagagcaccctcccctcctgtcctcaccctaccccaagttctcccacagtcactcctgccccatgctcatgccgccctccagttcttgctctgcccatctcccctccccaacccagacctaaaacaggctgttgggccaactgttccttgaccttccttcttttcttttggttccttgaccccagtgggctctcactccccacaccgcatatctaaaatctgttttgcctgctcttggggtgccactgctccccctccagcattactccttttggcaggtccttcctcaggctgagaatctccccctctaccttggttttctctctctggccagcacccccaccccttgctttgtttttaatttttaacttttgtttgggtacgtagtagatatatatgtatatatttatggggtacatgggatattttgacacaggcctacaatatgtaataatcacatcagggtaaatgggttatatcacaacaagcatttatcctttctttgtgctacaaacaatcccattatgctctttcagttatttttaaatgtacaataaattattgttgactgtactcaccctgctgtgctatctactagatcttattcattctaattatatttttgtacccattattaaccatccctgctcccccactccccactacccttctcagcctctggtaatcatcattctattgtctctccccatgaggtccattgttttaaattttggctgccacaaataagtgagaacatgcaaagtttgtctgtctgggcctggggcttatttcacttcacaggatgacctccagttctttgcaaatgacacgatggctgaatagttctccacatacacatgtacaccacattttctttatccatgcgtctgttgatggacacttagattgcttgcagatcttggctactttgaatagtgctgcaataaacatggaaaagtagatagctctttaatataccgatttcctttctttggagtatatgcctaacagtgggagtgctggagcatatgacagctctattgtatttttagtttttggaagaacctccacattgtttcccatagtggttgtactagtttacgttcccaccaacagtgtacatcctcaccagcattccttatttctacatcctcgccagcattccttattgcctgtcttctggataaaagccagtttatctggggtgggatgttatctcgtaggagttttgatttgccttcatctgttgacgaatgatgttgagcaccttttcatatacctgtttgccatttatatgtcttcttttgagaaatgactattcagatcttttctcatttttaaattggattattatattttttttcctatagttgttcgagctccttatatgtttcagttactgatcctttgtcagatgaatagtttgaaaatattttctcccattcttggatggtctcttcattttgtttattgtttcctttgctgtgcagaagcctttttacttgatatgatcccatttatgcaattttactttggttacctgtgcttgtggggtattactttaaaaatctttgcccagtccaatatcctagagagtttccccaatgttttcttgtatagtttcatagtttgaggtcatagatttacatctttaatccactttgatttgatttttgtatatggtgaaagacagggtctagtttcattcttctgcataaggatatctagtttccccagcaccatttttgaagagactctcctttgccaatgtgtgttcttggtacctttgttggaaatgagtttactgtagatgtatggaattgtttctgggttctctattctgtttcattggtctgtgtgtctgtttttatgccagtatcatgctgttttggttactgtagctctgtagtataatttgaagtcagataatgtgattcctctagttttgttcattttgctcaggatagctttatctattctggtttttttgtggttccatatgcattttaggattatttttattatttctgtgaagaatgtcattagtgttttgatagggattgcattgaatctgtagattactttgggtagtatggatatttcaacaaaactgattcttccaatccatgaacgtggactatcttttccattttttgtgtccttcaattttttgcatcagtgttttttgtttttggtttttgagatggagtttcactcttgttgcccaggctagaatgcaagggtgtgatcttggctcaccgcaacctccgcctcccaggttcaagctattcttctgcctcagcctcccaagtagctgggattacaggcatgtgccactgtgcctggctaattttctatttttattagagatggggtttctctatgttggccaggctagtcttgaactcctgacctcaggtgatccacctgcctcggcctcccaaagtgctgggattacaggcatgagccaccacgcccagccacatcactgttttatagtttttattggagaggtctttcacttcttcagttaggtttattcctcagtattttattttatttgtagctattgtaaatgggattcgtttcttgatttctttttcagattatttgctgttagcactgatttttgcatgttgattttgtatcctgcaactttactgaatttgttcttcagttctaatggttttttggtggagtctttaggtttttccaaatatcagaccacatgatctgcaaacaaggataatttgacttcttcttttccagttttaatgccctttctttctttctcctgtctgattgctctagttaggatctgcagtactgtgttgcataactgtggtaaaattagtcatccttgtcttattccagatcttagagaaaaggctttcagttttcccccattcagtatgttactagctgtgagtttgtcatatatggcttttattatattgaggtctgttccttgtatacttagttttttgagagtttttatcatgaagggatgttgaatttatcaaatgctttttcagtatcaattgaatgatactggcttttgtcctttattctgttgatatgacgtattacattgattgatttgtgtatgttaaatcatccttgcatacctggaatacattccacttgctcataaagaatgatcttttttaatgtattgttgaatgtggtttgctagtatttccttgacgatttttgcatcggtgttcatcagggatataggcctgtagttttcttttttatgatgtgtctttgcctggtttttgtatcaggatattcctggctttgtaaaatgagtttggaagtattccctcctcctctatttttcagaacagtttgaataggactgacatatgttgttctttaaaagtttaattgtggtaaattatacattacataaattttactgttttaaccacttttaagtgtatactcggtggcattagatacattcacatttttgtgcaacccaaaactctgtgcccattaatcggtaactccccattcctccctacctctggcccctggtaaccaccattctactttttgtttctatgaatttgaccactctaggtacctcatttaagcagaatcatgtaatgtttgtctttttgtttctggcttatttcacttataatatttttgaggttcggtgggcacagtggctcacgcctggatttccagcactttgggaggctgaagcaggtggatcacctgagtttcggagttcgaaaccagcctggccaacatggtgaaaccccatctctactaaaaataataaaagttagccgggcgtgatggcgggtgcctgtaatcccaactacttgggaggctgaggcaggagaatcgcttgaatccgggaagtggaggttgcagtgagctgagatcaggccactgcactccagcctgggcaacaagagtgaaattccatctccaaaaaaaaaaataaaacaataataataataatatttttgaggttcatccaagttgtagtatgggtcagaatttcattccttttaaggatggataatactcattatatgtatgtaccacatcttggttatccatccctcagacaatggacacttgggttacttctaccttttggatattggcaaatatttcatttcctttgggtatatatttatttcctttgggtatttcttttgggtatatatccagaaatagaagcagtacacaggggcttcattttctctgtctctttgccaaccttgctctgtgtgtgtgtgtatgtgtgtgtgtaggtgtgtgataacagccatcctgattggtttcaggtggcatctcattgtggtttggatttgcattttcctaatgagtgctgatattgagcatcttttcatgtgtttgttgatcatttgtaattttctttgaagaattggccatttaagtcttttgcccattttttcccccacatagcttctcttatcagatatatgacttgcaatatttatttcatttcggggttgattgctttttcactctgattgtgccctttgatgcatagatgttttgaattttcatcagtctactttgtcagttctttctattctatctgtgctttggtgtcatatccatgaaagcactgtcaaatcctatgtcatgaacattatccccaatgtttgcttctaagaaatttttaggttttagttcttgagtgtagagtttaggtctttgattcattttgagttaatttttgtatatagtgcaaattaagggtccaattttattttaacaccccctgcccccagaactatttgctgaaaagatcaactgactctttgtcacctgctcaccccagtggacactagctgttccatccaattgctgtcctggggccttgtcatgctactcttccactttgaacccaagcccacaccgttcgttgctcccctctgggatactgaccccactataaacttctctggggctacaaccttcctaccctttgtgcctcatgaccaccccctcccttgtccccgccatgcccatgatgagtctcttctcgaggcagctccccttgcctccatctcaccctcagcctatgcaccacagccacactggacatgggtccctctgagcctgagtcccttcccattcccaccatcccctctggcaagaccttccttccaccaccttcatgctcctcccttgcccctgcagggcagcctctccccttggcccctattcccttagggggcttgtggccacccagtccttgcacctggcctacaagtttgccatcttcattcccccttcttctgttcatcagccccctcctctatcctcccaccctcacagttttctttgtatatgaaatcctcgttcttgtccctttgcccgtgtgcatttcctgccccaggaaggttgggacagcagacctgtgtgttaaacatcaatgtgaagttacttccaggaagaagtttcacctgtgatttcctcttccccagagccccacagtcttcgttataacctcacggtgctgtcctgggatggatctgtgcagtcagggtttcttgctgaggtacatctggatggtcagcccttcctgcgctatgacaggcagaaatgcagggcaaagccccagggacagtgggcagaagatgtcctgggaaataagacatgggacagagagaccagggacttgacagggaacggaaaggacctcaggatgaccctggctcatatcaaggaccagaaagaaggtgagagtcggcaggggcaagagtgactggagaggccttttccagaaaagttaggggcagagagcagggacctgtctcttcccactggatctggctcaggctgggggtgaggaatgggggtcagtggaactcagcagggaggtgagccggcactcagcccacacagggaggcatggaggagggccagggaggcataccccctgggctgagttcctcacttgggtggaaaggtgatgggttcgggaatggagaagtcactgctgggtgggggcaggcttgcattccctccaggagattagggtctgtgagatccatgaagacaacagcaccaggagctcccagcatttctactacgatggggagctcttcctctcccaaaacctggagactgaggaatggacagtgccccagtcctccagagctcagaccttggccatgaacgtcaggaatttcttgaaggaagatgccatgaagaccaagacacactatcacgctatgcatgcagactgcctgcaggaactacggcgatatctagaatccggcgtagtcctgaggagaacaggtaccgacgctggccaggggctctcctctccctccaattctgctagagttgcctcacctcccagatgtgtccagggaaaccctccctgtgctatggatgaaggcatttcctgttggcacatcgtgtcctgattttcctctattgttagagccactggataaagacagagggtcagggactggaccatccagtgttgtaatcagggcaagtagaggaccctccgacagaatcctgagcctgtggtgggtgtcaggcaggagaggaagccttcagggccagggctgccccctctgcctcccagcctgcccatcctggagagttccctcctggccccacaacccaggagtccacccctgacatccccctcctcagcatcaatgtggggatcccagagcctgaggccacagtcccaaggcccatcctcctgccagcctggaagaactgggccccagagtgaggacagacttgcaggtcaggggtcccggagggcttcagccagagtgagaacagtgaagagaaacagccctgttcctctcccctccttagaggggagcagggcttcactggctctgccctttcttctccagtgccccccatggtgaatgtcacccgcagcgaggcctcagagggcaacatcaccgtgacatgcagggcttccagcttctatccccggaatatcatactgacctggcgtcaggatggggtatctttgagccacgacacccagcagtggggggatgtcctgcctgatgggaatggaacctaccagacctgggtggccaccaggatttgccgaggagaggagcagaggttcacctgctacatggaacacagcgggaatcacagcactcaccctgtgccctctggtgagcctagggtgaccctggagagggtcaggccagggtagggacagcagggatggctgtggctctctgcccagtgtataacaagtccctttttttcagggaaagtgctggtgcttcagagtcattggcagacattccatgtttctgctgttgctgctggctgctgctatttttgttattattattttctatgtccgttgttgtaagaagaaaacatcagctgcagagggtccaggtgagaaaagcgggcagtttctggagatggtaaggcccctgtctgggcagtagggtcccctcattgctcctgcaaagataggcatgttggtgacaaggcttccataacaggggatgaaagttggggaatttgggaagggaatgggggcagcatctccatctacacccataagtgctgcccaagcaagggtcaaacgcccagctgtggcatcctcctgctgcaggtgaggagtgggcagcagggagggctgcggcgcctgctctgtccccatcccggtctctgtgtctcttgaactcactagggcgcatccaggtggggtgagctgggaatcacgtgctgaatgctaagggcctggatgatcacggcctcagagggagcaaatagtaaaggcagctgtgatctggggagggccagaaactggagaggaatctgaggagaggcggtgcccctattcccttcctctctgcatccccctcccctgtttctccagccatcggggcggacaccgagaaaaagacctatgaggcccagcctgggggccctgcctgtgtagccctttggagaccccttgtaacagggagggtcctgagcacacatggccatctctgtccactttgcagctccccatgcacctcctccaggagctttcttggggttgtcgtgtcctctgcaccattcgaggccctactctttccaggttcccacggcctggcctccctgagtttcttgcagatgacatggatgagtagataagcagatgtccctgggccatttgaggagtggggcccagcccctcatcagggcagctgtggtccctgttttcatcctacctccgagtgttttcttctccagtccctgagggacacagtcctcagggcccatgtttttggggatttaatctgtgctctgtggcctcaccttgccctccctgagccaatttccctttctaaaggtggtcactgcctggtaagtttggagtaagggacggtcagaatcatttcccctacagtcaggttgtttgatgggggatgaaaagagacagcaggaagttttgtgtttctgcaaagacagaagcagttcaggcgacagtaagaggctggggtgtccaggaggatgtgtctggcagtagggtcgctggtttctcatccttgaacctaattgcactgtcaatcggcccctcaggcctgagcagatgggaaggtttgtcccctgccctgcagcaagagggccctgtccaggaggcacccacaacaggggcagtgcaggtctgtggtcactcctgctctcacctgtggcgtctcccgtagagggattgtcagttctggttccctgtgggcaggaatggtttcctcataggtcactggagttttggccaggaaaagagtatgaagttcatgtgccagtttctcaaaattcctgctttcaatgttgatgtccagtaaagatattcgtaatttcagctctataatcttaataggatttcctctaatattgtgaagcatattatatgaaacaggaacacaaatttctcaaaattcctgcgatgtccaataaagattttcataatttcagctctgcaatcttaataggatttcctaatactgtaaagcatattaaatgaaacaggaactcaaatttggagccccctctccaggaggttctgtgtggagatggtggctgtggcagtggcagttcccaggtgcagagggtgggcagaggcagcctcaggctaaggggtctcccctactccacatggagaaaatcccttgtaggttgcaagggcagtggccgggtggaatccctgctagggacagagcaggaaggcctcgcagcctcaccaagcagcagccctggggtggagctgcgtttccagggttaagcggaccaggcaggagtagcggttactcaagagcaggtcacaggcttgggttgtgagggtcaggagaggccaggcctcctcgagcaaggtgggggtcccagggtcaggtcaggtgcagatcctgtggcagccacgtctttccatgctgggcctgctgggccccccaggcttcctgatggggtccccagttaggagctgcctgctcagggctgggaggggaggagcactgagctgcagatagagggcagagcccacagtgggcagggcctgccctggtgtgtaggtgcctctgaaggagaggagggcctggggactgagagcaagggtcagggcctctctttggggaggcctctcactgtaacaggactggtcaggcctgagaggagggcactgggttccctcttgggtcttgtcctttagtcttggggccctttccctccctgcacgatgagtggtgggcacagggcacgggctgatgttgatggagtgatgggagggaactggcaggggctgggaaaagcaaggagggaggaagaaaaaagtgggggcctcatcttccctcagagaaagggcaaatctggttttggagcaactgaagagagaaaagtccccagggaataaacacaacactgcacccagtggagcatttacccatttccctcttttctccagagctcgtgagcctgcaggtcctggatcaacacccagttgggacgagtgaccacagggatgccacacagctcggatttcagcctctgatgtcagctcttgggtccactggctccactgagggcacctagactctacagccaggcggctggaattgaattccctgcctggatctcacaagcactttccctcttggtgcctcagtttcctgacctatgaaacagagaaaataaaagcacttatttattgttgttggaggctgcaaaatgttagtagatatgaggcatttgcagctgtgccatattaa

SEQ ID NO: 30 - DNA, 1410 bp, Homo sapiens
aagtttccgcggcgccttctccccggccactgcttgagccgctgagagggtggcgacgtcggggccatggggctgggcccggtcttcctgcttctggctggcatcttcccttttgcacctccgggagctgctgctgagccccacagtcttcgttataacctcacggtgctgtcctgggatggatctgtgcagtcagggtttctcactgaggtacatctggatggtcagcccttcctgcgctgtgacaggcagaaatgcagggcaaagccccagggacagtgggcagaagatgtcctgggaaataagacatgggacagagagaccagagacttgacagggaacggaaaggacctcaggatgaccctggctcatatcaaggaccagaaagaaggcttgcattccctccaggagattagggtctgtgagatccatgaagacaacagcaccaggagctcccagcatttctactacgatggggagctcttcctctcccaaaacctggagactaaggaatggacaatgccccagtcctccagagctcagaccttggccatgaacgtcaggaatttcttgaaggaagatgccatgaagaccaagacacactatcacgctatgcatgcagactgcctgcaggaactacggcgatatctaaaatccggcgtagtcctgaggagaacagtgccccccatggtgaatgtcacccgcagcgaggcctcagagggcaacattaccgtgacatgcagggcttctggcttctatccctggaatatcacactgagctggcgtcaggatggggtatctttgagccacgacacccagcagtggggggatgtcctgcctgatgggaatggaacctaccagacctgggtggccaccaggatttgccaaggagaggagcagaggttcacctgctacatggaacacagcgggaatcacagcactcaccctgtgccctctgggaaagtgctggtgcttcagagtcattggcagacattccatgtttctgctgttgctgctgctgctatttttgttattattattttctatgtccgttgttgtaagaagaaaacatcagctgcagagggtccagagctcgtgagcctgcaggtcctggatcaacacccagttgggacgagtgaccacagggatgccacacagctcggatttcagcctctgatgtcagatcttgggtccactggctccactgagggcgcctagactctacagccaggcagctgggattcaattccctgcctggatctcacgagcactttccctcttggtgcctcagtttcctgacctatgaaacagagaaaataaaagcacttatttattgttgttggaggctgcaaaatgttagtagatatgaggcgtttgcagctgtaccatattaaaaaaaaaaaaaaaaaa

SEQ ID NO: 31 - protein, 383 aa, Homo sapiens
MGLGPVFLLLAGIFPFAPPGAAAEPHSLRYNLTVLSWDGSVQSGFLTEVHLDGQPFLRCDRQKCRAKPQGQWAEDVLGNKTWDRETRDLTGNGKDLRMTLAHIKDQKEGLHSLQEIRVCEIHEDNSTRSSQHFYYDGELFLSQNLETKEWTMPQSSRAQTLAMNVRNFLKEDAMKTKTHYHAMHADCLQELRRYLKSGVVLRRTVPPMVNVTRSEASEGNITVTCRASGFYPWNITLSWRQDGVSLSHDTQQWGDVLPDGNGTYQTWVATRICQGEEQRFTCYMEHSGNHSTHPVPSGKVLVLQSHWQTFHVSAVAAAAIFVIIIFYVRCCKKKTSAAEGPELVSLQVLDQHPVGTSDHRDATQLGFQPLMSDLGSTGSTEGA

SEQ ID NO: 32 - DNA, 16848 bp, Homo sapiens
ctgtttccagcgagtcagattccagatcgcgctccagcctggactcggaattcctgccccgcgggtctgcattttcacagcggcaggtgtgagtgccgcgcagctggagaccagaagcctgaggcagctcggccctccccagcccaaagtgccgttattccgtttctgtatcagtaaacacgtttcattttccgtagaccagggaagggtgatgggtgatcccagtcctcgcagtgaattccgggccacaaaattcaaaacgcttgcgggcaaagccgtgcgcggtggctcaagcctgtaattccagcactttgggaggccgaggcgggcggatcacctgaggtcgggatttccagaccagcctgaccaacatagagaaaccccgcctctactaaaaatacaaaattagccgggggtggcgcatgcctgtaatcccagctagtcgggaggctgaggcaggagactcacttgaacccgggaggcggaggttgctgtgagccgagatcgcgccactgcactccagcctgggcaacaagagcgaaactccgtttcaaaaaaaaacaaaaaacaaaaagctttcgggcgccgagggcagccccgccctgaattttgtgagcgaccgcgctgggccgtttctctttcttttccggaccctgcagtggcgcctaaagtctgcgaggaggaagtcgcctctgtgctcgtgagtccagggatctaaggcaagtgctgagggagaaaacatagttgatggggcagagcagagggggctggaggtggggtggagggggagggctttgaacagaagacctgggaggcttggtgggggaggggacccaggcctcggcgctgagaagcaactcccctggagctcaagaccttcttggcctcccctagcccaggggaggactggcttcatgtctccctgaaaccgcttctaaatgccttagaacaaaccttaaatattcattattattattgaactattaaaagtcttttttggaggcgagctgaatgagaccctttgctggagctggcacacggaggaagtcctggagggagggtagacaccgtggagggaagggcttgggacctgtgtcaggagagctgggtccatctgcctctctgtctcaaactatgcttatgatctttagcagtgaaaataatctctctaaggtggggacaggaccccagtccctgctgtgcttaataaattatgaggatcaaaataaattatcagtgaatgtgtatgggaagactaagaaattgttaaaattctcgaatacattacattttcatccacagaaaagtgtaggctagggatgataggggaatagttagtaatgacagggatagttgaacttaaaaaaaaaggttgtgaggccaacaaaaaagaaatggacacagttcctgatcctggagggttcatagtctaatgggggaggagggtagaagatggtaggtgatggctgggtgtgtggcactcgcctgtagtcccagctactcaagaggctgtggtgggaggattgcttgagcccaggcatttgaggctgcagtgagctataatcacaccactgcattccaactgagtgacacagcaagactcctctcttaaaaaaataaaataaagtaaatgaaaaaaataagattcaagacagggcacagtcggtaccatcaggaaggttcaaaccatgggctagatcagtagttctaaaacttgactacacatcggaatcacgtagggaactttaaaagatactaaggtttaggtccaacctaggtttactgatttaactggttgtggctgtggcctgggaacatggatattaaaaactctccaggtggttctacgcagtggctaggtttgaagaccactgcctagatgtcccaatgactaagaatgtgcgctggggacaagccaattctcttagtagaggctttccagacagaattcttattattgagaattgagaattcacatgccacacataatttatcgttttaaagtgtacagatcagtggcttctagcataatcacaaggttgtgccaccgtcaccactatctacttgggaagattttcttcctttttttcttttttttttttttttttgaggcggagccttgctctgttgcccaggctggagtgcagtggcgcaatctcagctcactgcaagctccgcctcccgggttgaccccattctcctgcctcagccttctgagcagctgggactacaggtacccgccaccacgcccagctaagttttttgtatttttagtagagacggggtttcactgtgttagcaggatgctctcgatctcctgacctcgtgatctgcccacctcgacctcccaaagtgctgggattacaggcgtgagccaccgtgcccggaccctttttcctttttttttttttttaaaggctagtcaagtgaaacagtgggagtgaagatgaaacaaaaacatctataactggttgtgatcaattagttgtaaacaccactgcactcagaccagcctaactgggaagattttgaggatatgctgtggtctgatgggttccaaggcagaggtgacagtaacctggaagagggagactgcttaggcagtggcatcctggtgggatagggtgaggagatcccagagcccacgtttactgcaaccctggggaaatgtcaccagagaaatgggggtggtgccagacaatagattgtgggagctatggtttccatggtagagtagaagcatccaccatgtgtgacattcagcagatggggcgctgtgggtggcttggagcactctggttgtaactgaggcaggcacagtgtttaggaagcctgtgcagtaatccagactgaagggaggggaaagcctagactaagactatggctgtgggattgaaatagcgttgaaggagctgactttgactcccggagatgaaggagaaagaggaaatcagaagggaccaaggatggtgaagttcttaagagaaactgaggaggaagagaggatgatgtggtgggagacgtgtagagagtccttgtagatctgtcatattgaaggggactatggtcccagaggtacagatgtcctaaaacaggctggaaaagggagtctggagagagcttggtgttgtaatgaaccatggggagccgcctcgttggccctgtgattacccaggaactgaatagagagggggccctgggagacctcagacacttagaggatataagggggtgaaaggggggacctggctttgagtcgaagggaggagaaggagattatatagctgaaacgtctaagagaatttgtgatctgagcgtttctactggggcaagtgcttctgaaaggcagaggcggctgagatctggaaacaggtctgcaaatctggtcactggtctcattgcagtaacgctgtgcgcggttgagggagtgtattgggagaaaaaccacgcgttgtctgtcccggaaggaacaagccagtgagagccggcctgatgggaggaccggcgaaaggggcttggtgaagcccgcgctccttgggggtgggaatgcggggatggggtggtcgcgatgcagggagggcgacagggtccaggtcgtgctcataagtttggagctgtactctcagctactcggggctggtccttgattttggctgcgctcgcgcacgctcccccttttctggccgccaggtcccgccttctaaatttccccaggtctccaggccgctagaattttctcttctgaacgtggccccgccctctccactcatgattggccctaagttccgggcctcagttttcactggataagcggtcgctgagcggggcgcaggtgactaaatttcgacggggtcttctcacgggtttcattcagttggccactgctgagcagctgagaaggtggcgacgtaggggccatggggctgggccgggtcctgctgtttctggccgtcgccttcccttttgcacccccggcagccgccgctggtgagtggggttcctggcggtccccggcggagcgggagcggcggggcgtttccgggggtccgggtgggttgccgcgagcgctgtgcggtcagggcggggctcaggtgtgctgtctggagtgcagggagctggacgccgcctgttcccgccacacctcagccctgctttcccatctcccgtctctttttttttttttttttttttttttttttttttttttctttctgagacggagtctctgtcgcctaggctgtagtgcagtggcgcgatcttggctcactgcaagcgccgcctcccgggttcacgccattctcctgcctcagcctccctagtagctgggactacaggcgcccgccaccacgcccggctaattttttgtgtttttagtagagatggggtttcaccgtgttagtcaggatggtctcgatctcctgacctcgtgatccgcccgcctcggcctcccaaagtgctgggattacaggcgtgagccaccgcgcccgacctcctgtctcctttcagtcctcctcgggatcgcgcatcacccgcattttctggtctctcctgcacttgctctcctcgcctctcctccgtctcctctcacttttcggacaaaccagtccttctgaggcccctgggttcccgggctgctcctgtgaatggcattggaaggccgttccagcgcggccgctgaggcagccacttcccccggtgctgggggcggatctcaggtccctgaagtcctgtcctctcccggagccgatgtgttctcagctcctgggccgcagctcctggagttggggccctcctttcttgggacccggaggtggtgcttcttgctgctgtggggactgtggggggtcctgactctcaagctgaggggttggagtctgcaggctccgggcagaggattcttcctgcgacttctgtcatccccagctcattctcccctcgcctccggctccgggggtcctctcctctctcgcatcccacccctactaatgaccaatgatctaaggacaccagattccctctcacctcctccctgcccatcttacggcgccctgggtcctgttgctctcccagctccctgctaccccttcctgtgtgctgttctctgatccatttctagggtgtcctctgccttcatcccccgcccccgccactgaaggtccctcctgcctcctttatgggcctttcctgcaagcagccttcactccgtgctgcccctatgcctccccattcccaaatgtccctgactctaactttctggtgctgccttttgtccgggggggtcttccctccatcccactcccctccagacccccaaggagagccctgatgctaatggcagttgggccttaggcagggcgcagggcagcgcagatgccccctcccctccagtgcaggtgcctgctctgggccctgcctcattgtggccccttccccactccttcatcctcagcctcaccctcttgaggaccccaccctccagcccacaggtgctggaccatccctccctggtccctccgcccctctccaccttgggaccttgtgctgctcctatctcttgcccagctgcctggggccctcagcaagttctcatctttcagtgggaaagtgggagtgctggagcatatgacagtgctgagaatctttcccaagccccaccctcccccagagcaccctcccctcctgtcctcaccctaccccaagttctcccacagtcactcctgccccatgctcatgccgccctccagttcttgctctgcccatctcccctccccaacccagacctaaaacaggctgttgggccagctgttccttgaccttccttcttttcttttggttccttgaccccagtgggctctcactccccacaccgcatatctaaaatctgttttgcctgctcttggggtgccactgctccccctccagcattactccttttggcaggtccttcctcaggctgagaatctccccctctaccttggttttctctctctggccagcacccccaccccttgctttgtttttaatttttaacttttgtttgggtacgtagtagatatgtatgtatatatttatggggtacatgggatattttgacacaggcctacaatatgtcataatcacatcagggtaaatgggttatctatcacaacaagcatttatcctttctttgtgctacaaacaatcccattatgctctttcagttatttttaaatgtacaataaattattgttggctgtactcaccctgctgtgctatctactagatcttattcattctaactatatttttgtacccattaaccatccgcactcccccactccccactacccttctcagcctctggtagtcgtcattctattgtctctccccatgaggtccattgttttaatttttggctgccacaaataagtgagaacatgcgaagtttgtctctctgggcctggggcttatttcacttcacatgatgacctccagttctttgcaaatgacatgatggctgaatagtactccacatacacgtgtgcaccacattttctttctccattcgtctgttgatggacacttaggtcgcttgcagatcttggctattttgaatagtgctgcaataaacatggaaaagtagatagctctttaatataccgatttcctttcttttgggtatatgcctaacagtgggagtgctggagcatatgacagctctattatatttttagtttttggaagaacctccacattatttcccacagtggttatactagtttacgttcccaccaacagtgtacaagggttctcttttgctacatcctcgccaggattccttattgcctgtcttctggataaaagccagtttatctggggtgggatgatatctcgtaggagttttgatttgccttcatctgatgacgaatgatgttgagcaccttttgatatacctgtttgccatttgtatgtcttcttttgagaaatgactattcagatcttttgctcatttttaagttggattattagatatttttcctatagagttgtttgagatccttatatgttttggttactaatcctttgtcagatgaatagtttgaaaatattttctcccattcttggatggtctcttcactttgtttattgtttcctttgctgtgcagaagctttttaacttgatatgatcccatttatgcatttttactttggttgcctctgcttgtggggtattacttaaaaaatctttgccagtccaatatcttagagagtttccccaatgttttctttcatagttttcatagtttgaggtcatagatttacatctttaatcctttttgattggatttttatatgtggtgagagatagggtccagtttcattcttctgcataaggatatctagtttccccagcaccatttattgaagagactctcctttgccctgtatgtgttcttggtaactttgttagaaataacttcactgtagatatatggatttgtttctgggttctctattctgtttcattggtccgtgtgtctgtttttatgccactaccgtgctgttttgattactctagctctgtagtataatttgaagtcagataatgtgattccgctagttttgttctttttgctcagggtagctttatctattctgggttttttgtgattccatatacattttaggattgtttttctatttctgtgaagaatgtcattggtgttttgatagcaattgcattgaatttgtagattgctttgggtaggatggatattttaacaaaattgattcttccggctgggcacggtggctcactcctgtaatcccagcactttgggaggccgagtcaggtggatcacttgagatcaggagttcaagaccagcctgatcaacatggggaaaccccgcctctactaaaaatacaaaattagccaggcgtggtggcatatgcctgtaatcccagctactcaggaaagctgaggcaggagaatcgcttgaacccaggaggcagaggttgtggtgagctgagattgcaccattgcactccagcctgggcaacaggagcaaaactccatctcagaaaataaaaataaacattgattcttccagtccgtgaacatggaatgccttttccattttttgtgtcctcttcaatgttttgcatcagtgctttatagtttttattggagagatctttcacttcttcagttaagtctattcctaggtattttattttatttgtagctaatgaaaatgggattcgtttcttgatttctttttcagattatttgctgttagcacatagaagtgctattgttttttgcatgttgattttgtatcctgcaactttactgaatttgttcttcagttctaatagttttttggtggagtctttaggttttccaaatatcagaccacatgatgtgcaaacaaggataatttgacttcttcttttccaattttgatgccctttatttccttctcctgtcagattgctctagctaggacttgcagtattgtgttgcataactgtagtgaaagtagtcatccttgtcttgttccagatcttaaagaaaaggctttcagttttcccccattcagtatgttactagctgtgagttgtcatatatggcttttgttatattgaggtctgttccttgtatactcagtttttttagagtttttatcatgaagggatgttaaacttatcaaatgctttttcagtatcaattgaaatggtgatatggcttttgtcctttattctgttgatacgatgtattacattgattgatttgtgtatgcatacctggaatacattccacttggtcatgaagaatgatctttttaatatactgttgaatgtggtttgctagtatttcattgatgatatttgcctcaatgttcatcagggatataggcctgtagttttctttttttgatgtgtctttgcctgattttgatatcaggatattcctggctttgtaaaatgagtttggaagtattccctcctcctctgtttttcagaacaatttgaataggactgatatttcttgttctttaaacgtttaattgtggtaaattatacattacatacattttactgttttaaccgcttttaagtgtatactcggtggcattagatacattcacatttttgtgcaacccaaaactctgtacccattaatcagtaactccccattcctccctacctctggcccctggtaaccatcattctactttttgtttctatgaatttgaccactctaggtacctcatttaagtagaatcgtgtaatgtttgtctttttgattctggcttatttcacttataatatttcgaggttcatccaggttgtagtatgggtcagattttcattccttttaatgatgaataatactcattatatgtatgtaccacatcttggttatccattcctcagacaatggacacttgggttacttctaccttttggatattggcaaatatttcatttctcttgggtatatatttatttcttttgagtatttcttttgggtatatatccagaaatagaattgttggatcatacggtatttcattttttaatttttagaggaatcaccatagtgttttccattgcaggcgtgccattttgtatttctagaagcagtatacaggggcttcagtttctctacctccttgccaaacttgctgtgtgtgtgtgtgtgtgtgtgtgtgtgtgtgtgtgtgataatagccaccctgattggtttgaagtggtatctcattgtggtttggatttgcattttcctaatgagtactgatattgagcatcttttcatgtgtttattgatcatttgtatattttctttgaagaattggccattgaagtcttgcccatttttctcccccacatagcttctcatggctattttgcccatttttgagtgggttgactgttttgttgtttttgtcaaacttttttgcatattctggaaactaatctctctctttttctttttttttttttttttttttttgagatggagtcttgctctgttgcccaggctggagtgcagtggcacgatctcagctcactgcaagctccgcccgctagcttcatgccattctcccgcctcagcctcccgagtagctgggactacaggcgcccgccaccacacccggctaattttttgtatttttagtagagatagggtttcaccatgttagccaggatggtctcaatctcctgacctggtgatacacccgcctcggcctcccaaagtgctggaactacaggcttgagccaccacgcctggccttctggaaactaatctcttatcagatatatgacttgcaatatttatttcatttcaggggttgattgctttctcactctgattgtgccctttgatgcacagatattttgaatttttcatgagtccagtttgtcagttctttctattctatctgtgctttggcgtcatatccatgaaagcactgtcaaaccctatgtcatgaacattatacccaatgtttttttctaagatatttttatgttttagttcttgagtttagagtttaggtctttgattcattttgagttaatttttgtatatagtacaaattaagggtccaattttatattatttgaacatccagttcccccagcactatttgctgaaaagatggacttactctttgagaccctgtcacctgcccaccccagtggacactagctggtccatccaattgctgtcctggggccttgtcatgctactcttccactttggacccaagcccacatcattgctcccctctgggatactgaccccactataaacttcactggggctacaaccttcctaccccttgtgcctcatgaccaccccctcccttgtccccaccatgcccatgatgagtcttttctcaaggcagctcgccttgcctccatctcaccctcacctgtgcaccacagccacactggacatgggtccctctgagcctgagtcccttcccattcccactgtcccctctggcaagaccttccttccaacactgccttcatgctcctcccttgcccctgcagggcagcctctccccttggcccctattcccttagggggcttgtggccacccagtcctggcacctgacctacaagtttgccatcttcattcccccttcttctgttcatcagccccctcctctatcctcccaccctcacagttttccttgtatatgaaatcttcgttcttgtccttttgcccatgcgcatttcctgcctcctcagggaggtcgggacagcagacctgtgtgttaaacatcaatgtgaagttatttccaggaagaagtttcacctgtgatttcctcttccccagagccccacagtcttcgttacaacctcatggtgctgtcccaggatggatctgtgcagtcagggtttctcgctgagggacatctggatggtcagcccttcctgcgctatgacaggcagaaacgcagggcaaagccccagggacagtgggcagaaaatgtcctgggagctaagacctgggacacagagaccgaggacttgacagagaatgggcaagacctcaggaggaccctgactcatatcaaggaccagaaaggaggtgagagtcggcaggggcaagagtaatgggaggccttctccaggaaagttggagacagagagcagggacctgtctcttcccgctggatctggctgggggtggggatgaggaatagggtcagggaggctcagcagggtggtgagccggaactcagcccacacagggaggcatggaggagggccagggaggggtcgctgctgggctgagttcctcacttgggtggaaaggtgatgggttcgggaatggagaagtcactgctgggtgggggcaggcttgcattccctccaggagattagggtctgtgagatccatgaagacagcagcaccaggggctcccggcatttctactacgatggggagctcttcctctcccaaaacctggagactcaagaatcgacagtgccccagtcctccagagctcagaccttggctatgaacgtcacaaatttctggaaggaagatgccatgaagaccaagacacactatcgcgctatgcaggcagactgcctgcagaaactacagcgatatctgaaatccggggtggccatcaggagaacaggtaccgaccctggccaggggctctactgttcccgcaattctgctagagttgcctcgcctcccagctctgtccggggaaaccctccctgtgctatggatgcaggcgtttcctgttggcatattgtgtcctgatttgcctctcctgttagagccattggataaagacagtgggtctgggactgaactgtccagtgttgtaatctgggaaagcagtgggccctctgacagaagcctgagcctggtgtgggagttaggcaggagaggaagccctcagggccagggctgccccctctgcctcccggcctgcccatcccggagagttccctcctggccccatgacccaggagtccacccttgacatccccctcctcagcatcaatgtggggatcccagagcctgaggccacagtcccaaggcccatcctcctgctagcctggaggaattaggccccagggtgaggacagacttacagaaggtccggtatctgtgagggattcagccagagtgagaacagtggagaggagcagccctgttccctgcatctcccttagaggggagcagggcttcactggctctgccctttcttctccagtgccccccatggtgaatgtcacctgcagcgaggtctcagagggcaacatcaccgtgacatgcagggcttccagcttctatccccggaatatcacactgacctggcgtcaggatggggtatctttgagccacaacacccagcagtggggggatgtcctgcctgatgggaatggaacctaccagacctgggtggccaccaggattcgccaaggagaggagcagaggttcacctgctacatggaacacagcgggaatcacggcactcaccctgtgccctctggtgagcctggggtgaccctggagagggtcaggccagggtaggaacagcaaggacggctgtggctctctgcccagtgtataacaagtccctttttttcagggaaggcgctggtgcttcagagtcaacggacagactttccatatgtttctgctgctatgccatgttttgttattattattattctctgtgtcccttgttgcaagaagaaaacatcagcggcagagggtccaggtgagaaaaggggacagtttctggagatgggaaagctcctttctaggcagtagggtctcctcattgctcctgcccagacaagacgtaggtgacaaggctgctgggacaggggatggaagctggggtatttgggaggggaatgggagctgcatctccatctacacccataagtgcttcccaagccagggctggggcaaggccttcgaatatccagctgtggcctcctcctgctgcaagtgaggagtgggcagcagggagggctgtggcacctgctctgtccccatcccagcctctctgtctctcgggctcactagggtgcgtccaggtggggtgagttgggaatcacgtgctgattgctgagggcctggatgatcatggtgtcagagggaggaaatagtaaaggtggctgtgatctggggagggccagaaactggagaggaatccaaggagaggcgatgcccacccgtgtgcctcctccaggaggcactttccaggttcccactacctggcctccctgagtttccttgcagatgacacagatgaatagataagcagatgtccctgggccatttgaggagcggggcccagcccctcatcagggcagatgtggtccctgttttcatcctacctccagcgtgttttcttctgcagtccctgagggacacagtccccaggcgccatctctttgaggctttgttctgtgctctgtggccttaccttgccctccctgagccaatttccctttctcaaggtggtcactgcctggtaagtttggagtaagggacagtcagaagcatttcccccacagtcaggttgtttgatgggagatgaaaagagacagcagaagttttgtgtttctgcaaaaacagaggcagtgcaggggacagtgagaggctggggtgtccaggagacctgagtctggcggtaggggcgctggtttctcatccttgaacctagttgcactgtcagtcggcccctcatgcctgagcagatgggaaggttcgtcccctgccctgcagcaagagggccccatccaggaggcacccacagcaggggcagtgcaggtctgtggtcactcctgctctcacctgcggcgtctcccgtggagggattgtcacttctggttccctgtgggcaggaatggtttcctcgtaggtcactggggttttggccaggaaaagggtatgaaattcatgtgccagtttctcaaaattcctgctttcaatgttgatgtccaataaagatgttcgtaatttcagctctataatcttaataggatttcctctaatactgctgttgtaaagcatattaaataaaacaggaactcaaatttggagccccctctccagaagggtctgtgtggagatggtggctgtggcagcggcagttcccaggtgcagagggtgggcagaggcagcctcaggctaaggggtctcccctactccacgtggagaaaagtccttgtaggttgcaagggcagtggcctgggtggaatccctgctagggacagagcaggaaggcctcacagcctcaccaagcagcagccctggggtgaagtaagtggaccaggagtaagtggaccaggcaggagcagtagtgactcaacagcaggtcacaggcctaggtgggtgctgaaggtcatgggaggccaggcctcctcgagcaaggtggggggtcccagggtcaggtcaggtgcagatcctgtggcagccacgtctttccatgctgggcctgctgggccccccaggcttcctgatggggtccccagttaggagctgcctgctcagggctgggaggggaggagtgctgagctgcagatagagggcagggcccacagtgggcagggcctgccctggtgtgcaggtgcctctgcaggagagaagggcctggggactgagagcaagggtcagggcctctctttggggaggcctctcactgtaacaggactggtcaggcctgagaggagggcactgggttccctcttgggtcttgtccttttgtcttggggccctttcactccctgcacggtgagtggtgggcacaggacaggggctgatgttgatggagtgatgggagagaactgacaggggctgggaaaagcaaggagggaggaagaaaaaagtgggggcctcatcttctctcagagaaagggcgaatctgattttggggcaactgaagagagaaaagtccttagggaataaacacaacactgcacccagtggagcatttacccgtttccctcttctccagagcttgtgagcctgcaggtcctggatcaacacccagttgggacaggagaccacagggatgcagcacagctgggatttcagcctctgatgtcagctactgggtccactggttccactgagggcacctagactctacagccaggcggccaggattcaactccctgcctggatctcaccagcactttccctctgtttcctgacctatgaaacagagaaaataacatcacttatttattgttgttggatgctgcaaagtgttagtaggtatgaggtgtttgctgctctgccacgtagagagccagcaaagggatcatgaccaactcaacattccattggaggctatatgatcaaacagcaaattgtttatcatgaatgcaggatgtgggcaaactcacgactgctcctgccaacagaaggtttgctgagggcattcactccatggtgctcattggagttatctactgggtcatctagagcctattgtttgaggaatgcagtcttacaagcctactctggacccagcagctgactccttcttccacccctcttcttgctatctcctataccaataaatacgaagggctgtggaagatcagagcccttgttcacgagaagcaagaagccccctgaccccttgttccaaatatactcttttgtctttctctttattcccacgttcgccctttgttcagtccaatacagggttgtggggcccttaacagtgccatattaattggtatcattatttctgttgtttttgtttttgtttttgtttttgtttttgagacagagtctcactctgtcacccaggctgcagttcactggtgtgatctcagctcactgcaacctctgcctcccaggttcaagcacttctcgtacctcagactcccgaatagctgggattacagacaggcaccaccacacccagctaatttttgtattttttgtagagacggggtttcgccaagttgaccagcccagtttcaaactcctgacctcaggtgatctgcctgccttggcatcccaaagtgctgggattacaagaatgagccaccgtgcctggcctattttattatattgtaatatattttattatattagccaccatgcctgtcctattttcttatgttttaatatattttaatatattacatgtgcagtaattagattatcatgggtgaactttatgagtgagtatcttggtgatgactcctcctgaccagcccaggaccagctttcttgtcaccttgaggtcccctcgccccgtcacaccgttatgcattactctgtgtctactattatgtgtgcataatttataccgtaaatgtttactctttaaataga

SEQ ID NO: 33 - DNA, 2426 bp, Homo sapiens
gaattttgtgagcgaccgcgctgggccgtttctctttcttttccggaccctgcagtggcgcctaaagtctgcgaggaggaagtcgcctctgtgctcgtgagtccagggatctaagagccccacagtcttcgttacaacctcatggtgctgtcccaggatggatctgtgcagtcagggtttctcgctgagggacatctggatggtcagcccttcctgcgctatgacaggcagaaacgcagggcaaagccccagggacagtgggcagaaaatgtcctgggagctaagacctgggacacagagaccgaggacttgacagagaatgggcaagacctcaggaggaccctgactcatatcaaggaccagaaaggaggcttgcattccctccaggagattagggtctgtgagatccatgaagacagcagcaccaggggctcccggcatttctactacgatggggagctcttcctctcccaaaacctggagactcaagaatcgacagtgccccagtcctccagagctcagaccttggctatgaacgtcacaaatttctggaaggaagatgccatgaagaccaagacacactatcgcgctatgcaggcagactgcctgcagaaactacagcgatatctgaaatccggggtggccatcaggagaacagtgccccccatggtgaatgtcacctgcagcgaggtctcagagggcaacatcaccgtgacatgcagggcttccagcttctatccccggaatatcacactgacctggcgtcaggatggggtatctttgagccacaacacccagcagtggggggatgtcctgcctgatgggaatggaacctaccagacctgggtggccaccaggattcgccaaggagaggagcagaggttcacctgctacatggaacacagcgggaatcacggcactcaccctgtgccctctgggaaggcgctggtgcttcagagtcaacggacagactttccatatgtttctgctgctatgccatgttttgttattattattattctctgtgtcccttgttgcaagaagaaaacatcagcggcagagggtccagagcttgtgagcctgcaggtcctggatcaacacccagttgggacaggagaccacagggatgcagcacagctgggatttcagcctctgatgtcagctactgggtccactggttccactgagggcacctagactctacagccaggcggccaggattcaactccctgcctggatctcaccagcactttccctctgtttcctgacctatgaaacagagaaaataacatcacttatttattgttgttggatgctgcaaagtgttagtaggtatgaggtgtttgctgctctgccacgtagagagccagcaaagggatcatgaccaactcaacattccattggaggctatatgatcaaacagcaaattgtttatcatgaatgcaggatgtgggcaaactcacgactgctcctgccaacagaaggtttgctgagggcattcactccatggtgctcattggagttatctactgggtcatctagagcctattgtttgaggaatgcagtcttacaagcctactctggacccagcagctgactccttcttccacccctcttcttgctatctcctataccaataaatacgaagggctgtggaagatcagagcccttgttcacgagaagcaagaagccccctgaccccttgttccaaatatactcttttgtctttctctttattcccacgttcgccctttgttcagtccaatacagggttgtggggcccttaacagtgccatattaattggtatcattatttctgttgtttttgtttttgtttttgtttttgtttttgagacagagtctcactctgtcacccaggctgcagttcactggtgtgatctcagctcactgcaacctctgcctcccaggttcaagcacttctcgtacctcagactcccgaatagctgggattacagacaggcaccaccacacccagctaatttttgtattttttgtagagacggggtttcgccaagttgaccagcccagtttcaaactcctgacctcaggtgatctgcctgccttggcatcccaaagtgctgggattacaagaatgagccaccgtgcctggcctattttattatattgtaatatattttattatattagccaccatgcctgtcctattttcttatgttttaatatattttaatatattacatgtgcagtaattagattatcatgggtgaactttatgagtgagtatcttggtgatgactcctcctgaccagcccaggaccagctttcttgtcaccttgaggtcccctcgccccgtcacaccgttatgcattactctgtgtctactattatgtgtgcataatttataccgtaaatgtttactctttaaatagaaaaaaaaaaaaaaa

SEQ ID NO: 34 - protein, 351 aa, Homo sapiens
MVLSQDGSVQSGFLAEGHLDGQPFLRYDRQKRRAKPQGQWAENVLGAKTWDTETEDLTENGQDLRRTLTHIKDQKGGLHSLQEIRVCEIHEDSSTRGSRHFYYDGELFLSQNLETQESTVPQSSRAQTLAMNVTNFWKEDAMKTKTHYRAMQADCLQKLQRYLKSGVAIRRTVPPMVNVTCSEVSEGNITVTCRASSFYPRNITLTWRQDGVSLSHNTQQWGDVLPDGNGTYQTWVATRIRQGEEQRFTCYMEHSGNHGTHPVPSGKALVLQSQRTDFPYVSAAMPCFVIIIILCVPCCKKKTSAAEGPELVSLQVLDQHPVGTGDHRDAAQLGFQPLMSATGSTGSTEGT

SEQ ID NO: 35 - DNA, 20 bp, Artificial Sequence
  Description of Artificial Sequence: Synthetic primer
cgcctagagaagaggctgtg

SEQ ID NO: 36 - DNA, 20 bp, Artificial Sequence
  Description of Artificial Sequence: Synthetic primer
ctgctgtggctgtggtgtag

SEQ ID NO: 37 - DNA, 1341 bp, Sus scrofa
ggaactcggagaggtctccgctaggctggtgtcgggttacctgctcatcttcccgaaaatgatggcgttttgcgcgctgcgcaaggcacttccctgccgtcccgagaatcccttttcttcgaggtgcttcgttgagattctttgggtgtcgttggccctagtgttcctgcttcccatgccctcagatgcctgtgatgagccaccgaagtttgaaagcatgcggccccaatttttgaataccacttacagacctggagaccgtgtagagtatgaatgtcgccccgggttccagcccatggttcctgcgcttcccaccttttccgtctgtcaggacgataatacgtggtcacccctccaggaggcttgtcgacgaaaagcctgttcgaatctaccagacccgttaaatggccaagttagctacccaaatggggatatgctgtttggttcaaaggctcagtttacctgtaacactggtttttacataattggagccgagactgtgtattgtcaggtttctgggaatgttatggcctggagtgagccctccccgctatgtgagaagattttgtgtaaaccacctggcgaaattccaaatggaaaatacaccaatagccataaggatgtatttgaatacaatgaagtagtaacttacagttgtctttcttcaactggaccggatgaattttcacttgttggagagagcagccttttttgtattgggaaggacgagtggagtagtgacccccctgagtgtaaagtggtcaaatgtccatatccagtagtcccaaatggagaaattgtatcaggatttggatcaaaattttactacaaagcagaggttgtatttaaatgcaatgctggttttacccttcatggcagagacacaattgtctgcggtgcaaacagcacgtgggagcctgagatgccccaatgtatcaaagattccaagcctactgatccacctgcaaccccaggaccaagccatccaggacctcccagtcccagtgatgcatcaccacctaaagatgctgagagtttagatggaggaatcatcgctgcaattgttgtgggcgtcttagctgccattgcagtaattgctggtggtgtatacttttttcatcataaatacaacaagaaaaggtcgaagtaaaactgatgtgcttaaagtaaaagttgctgagaggacgtggaatccagccccttccctctcctgtgctgctgcctgggtcccgttttgcatgtcatgactgtgtgcttccaaaaaatgccttttgttcgtatttttttgcctaaacgcatgattttgtctctacttgaattaaatcatcactgaatccacgc

SEQ ID NO: 38 - DNA, 1546 bp, Sus scrofa
cggcacgagatttcgtcttaatcgcggaggtcgcagagtccgggagccgctcggggtccccgttcccgcgcgccatgagtcccctgccgcggagcgcccccgcggtgaggcgcctaatgggcggacagacgccgccgccgctgctgctgctgctgctgctgctgtgtatcccggctgcgcagggtgactgcagccttccacccgatgtacctaatgcccaaccagatttgcgaggtcttgcaagttttcctgaacaaaccacaataacatacaaatgtaacaaaggctttgtcaaagttcctggcatggcagactcagtgctctgtcttaatgataaatggtcagaagttgcagaattttgtaatcgtagctgtgatgttccaaccaggctacattttgcatctcttaaaaagtcttacagcaaacagaattatttcccagagggtttcaccgtggaatatgagtgccgtaagggctataaaagggatcttactctatcagaaaaactaacttgccttcagaattttacgtggtccaaacctgatgaattttgcaaaaaaaaacaatgtccgactcctggagaactaaaaaatggtcatgtcaatataacaactgacttgttatttggcgcatccatctttttctcatgtaacgcagggtacagactagttggtgcaacttctagttactgttttgccatagcaaatgatgttgagtggagtgatccattgccagaatgccaagaaatttctccaactgtcaaagccataccagctgttgagaaacccatcacagtaaattttccagcaacaaagtatccagctattcccagggccacaacgagttttcattcaagtacatctaaaaatcgaggaaacccttcttcaggcatgagaatcatgtcgtctggtaccatgctacttattgcaggaggtgttgctgttattataataattgttgccctaattctagccaaaggtttctggcactatggaaaatcaggctcttaccacactcatgagaacaacaaagccgttaatgttgcattttataatttacctgcgactggcgatgccgcagatgtaagacctggtaattaacaaaaggacggtgcatgtgtaacactgacagttttgcttatggtgctagtaaccattggctagctgacttagccaaagaagagttaagaagaaagtgcacacaagtacacagaatattttcagtttcttagaactttcaggtggagtggacatagtttgtggatagtgttcttcgttttgcatgttttcattgtctctaaggtacataggaatgtcacagaaccaaagagaaacaaatctatcctgaaattacatcctcaacactcctaagactcttgaaaatagaacagctcataagattgagagcaattactttccaaaaagggtgagaaaatggagagatttgttcatggttagaatataagaaaaaagaaaacaaaaaggtgatttttcccaccaaatgtgtaatgttatttttattaataaaggaaaaaaaaaaaaaaaaa

SEQ ID NO: 39 - DNA, 773 bp, Sus scrofa
gaaaagacgcgcaggccgggccgctctcccgacggggagtagcgctgcagccggacgcagggtgcagttagaatccatagacggtcacgatgggaagcaaaggagggttcattttgctctggctcctgtccatcctggctgttctctgccacttaggtcacagcctgcagtgctataactgtatcaacccagctggtagctgcactacggccatgaattgttcacataatcaggatgcctgtatcttcgttgaagccgtgccacccaaaacttactaccagtgttggaggttcgatgaatgcaatttcgatttcatttcgagaaacctagcggagaagaagctgaagtacaactgctgccggaaggacctgtgtaacaagagtgatgccacgatttcatcagggaaaaccgctctgctggtgatcctgctgctggtagcaacctggcacttttgtctctaactgtacaccaggagagtttctcctcaacttcctctgtctctctgttcctatttcccatgctgcggtgttccaaaggctgtgtatgctccagcttcttcctgttgggaaggactaaacctagcttgagcactttggattagagagagaaactttgagcgactttgaagaccaggcctgttggcagagaagacctgtcagaggggaaacgttttaagagtgaagcacaggtgatttgagcgaggcctatgcgtcttcctctgctcttggcaggaccagctttgcggtaaccattcgatagattccacaatcctt

SEQ ID NO: 40 - DNA, 261 bp, Human herpesvirus 2
tcaaggggccagcacgcgatcctgccgctcgttcgatctagcacacccacgggtctgctgtgtgggatttcgactcgcgggatccgatcgcacgtccggaggacacagcagcgggagctccgggtcggtcaccgcagttctggccgcctctcggtcctcccgttcccttttatggatctccgcgcagacatcgccatacgtccggtgtgtgcaccgcgaagaatccagaaacatgtccgtcgttttcagggcccaagacat

SEQ ID NO: 41 - DNA, 1578 bp, Homo sapiens
agtgtggtactttgtcttgaggagatgtcctggactcacacggaaacttagggctacggaatgaagttctcactcccattaggtgacaggtttttagagaagccaatcagcgtcgccgcggtcctggttctaaagtcctcgctcacccacccggactcattctccccagacgccaaggatggtggtcatggcgccccgaaccctcttcctgctgctctcgggggccctgaccctgaccgagacctgggcgggctcccactccatgaggtatttcagcgccgccgtgtcccggcccggccgcggggagccccgcttcatcgccatgggctacgtggacgacacgcagttcgtgcggttcgacagcgactcggcgtgtccgaggatggagccgcgggcgccgtgggtggagcaggaggggccggagtattgggaagaggagacacggaacaccaaggcccacgcacagactgacagaatgaacctgcagaccctgcgcggctactacaaccagagcgaggccagttctcacaccctccagtggatgattggctgcgacctggggtccgacggacgcctcctccgcgggtatgaacagtatgcctacgatggcaaggattacctcgccctgaacgaggacctgcgctcctggaccgcagcggacactgcggctcagatctccaagcgcaagtgtgaggcggccaatgtggctgaacaaaggagagcctacctggagggcacgtgcgtggagtggctccacagatacctggagaacgggaaggagatgctgcagcgcgcggacccccccaagacacacgtgacccaccaccctgtctttgactatgaggccaccctgaggtgctgggccctgggcttctaccctgcggagatcatactgacctggcagcgggatggggaggaccagacccaggacgtggagctcgtggagaccaggcctgcaggggatggaaccttccagaagtgggcagctgtggtggtgccttctggagaggagcagagatacacgtgccatgtgcagcatgaggggctgccggagcccctcatgctgagatggaagcagtcttccctgcccaccatccccatcatgggtatcgttgctggcctggttgtccttgcagctgtagtcactggagctgcggtcgctgctgtgctgtggagaaagaagagctcagattgaaaaggagggagctactctcaggctgcaatgtgaaacagctgccctgtgtgggactgagtggcaagtccctttgtgacttcaagaaccctgactcctctttgtgcagagaccagcccacccctgtgcccaccatgaccctcttcctcatgctgaactgcattccttccccaatcacctttcctgttccagaaaaggggctgggatgtctccgtctctgtctcaaatttgtggtccactgagctataacttacttctgtattaaaattagaatctgagtataaatttactttttcaaattatttccaagagagattgatgggttaattaaaggagaagattcctgaaatttgagagacaaaataaatggaagacatgagaacttt

SEQ ID NO: 42 - DNA, 2679 bp, Homo sapiens
gcagactcagttctcattcccaatgggtgtcgggtttctagagaagccaatcagcgtcgccacgactcccgactataaagtccccatccggactcaagaagttctcaggactcagaggctgggatcatggtagatggaaccctccttttactcctctcggaggccctggcccttacccagacctgggcgggctcccactccttgaagtatttccacacttccgtgtcccggcccggccgcggggagccccgcttcatctctgtgggctacgtggacgacacccagttcgtgcgcttcgacaacgacgccgcgagtccgaggatggtgccgcgggcgccgtggatggagcaggaggggtcagagtattgggaccgggagacacggagcgccagggacaccgcacagattttccgagtgaatctgcggacgctgcgcggctactacaatcagagcgaggccgggtctcacaccctgcagtggatgcatggctgcgagctggggcccgacgggcgcttcctccgcgggtatgaacagttcgcctacgacggcaaggattatctcaccctgaatgaggacctgcgctcctggaccgcggtggacacggcggctcagatctccgagcaaaagtcaaatgatgcctctgaggcggagcaccagagagcctacctggaagacacatgcgtggagtggctccacaaatacctggagaaggggaaggagacgctgcttcacctggagcccccaaagacacacgtgactcaccaccccatctctgaccatgaggccaccctgaggtgctgggccctgggcttctaccctgcggagatcacactgacctggcagcaggatggggagggccatacccaggacacggagctcgtggagaccaggcctgcaggggatggaaccttccagaagtgggcagctgtggtggtgccttctggagaggagcagagatacacgtgccatgtgcagcatgaggggctacccgagcccgtcaccctgagatggaagccggcttcccagcccaccatccccatcgtgggcatcattgctggcctggttctccttggatctgtggtctctggagctgtggttgctgctgtgatatggaggaagaagagctcaggtggaaaaggagggagctactctaaggctgagtggagcgacagtgcccaggggtctgagtctcacagcttgtaaagcctgagacagctgccttgtgtgcgactgagatgcacagctgccttgtgtgcgactgagatgcaggatttcctcacgcctcccctatgtgtcttaggggactctggcttctctttttgcaagggcctctgaatctgtctgtgtccctgttagcacaatgtgaggaggtagagaaacagtccacctctgtgtctaccatgacccccttcctcacactgacctgtgttccttccctgttctcttttctattaaaaataagaacctgggcagagtgcggcagctcatgcctgtaatcccagcacttagggaggccgaggagggcagatcacgaggtcaggagatcgaaaccatcctggctaacacggtgaaaccccgtctctactaaaaaatacaaaaaattagctgggcgcagaggcacgggcctgtagtcccagctactcaggaggcggaggcaggagaatggcgtcaacccgggaggcggaggttgcagtgagccaggattgtgcgactgcactccagcctgggtgacagggtgaaacgccatctcaaaaaataaaaattgaaaaataaaaaaagaacctggatctcaatttaatttttcatattcttgcaatgaaatggacttgaggaagctaagatcatagctagaaatacagataattccacagcacatctctagcaaatttagcctattcctattctctagcctattccttaccacctgtaatcttgaccatataccttggagttgaatattgttttcatactgctgtggtttgaatgttccctccaacactcatgttgagacttaatccctaatgtggcaatactgaaaggtggggcctttgagatgtgattggatcgtaaggctgtgccttcattcatgggttaatggattaatgggttatcacaggaatgggactggtggctttataagaagaggaaaagagaactgagctagcatgcccagcccacagagagcctccactagagtgatgctaagtggaaatgtgaggtgcagctgccacagagggcccccaccagggaaatgtctagtgtctagtggatccaggccacaggagagagtgccttgtggagcgctgggagcaggacctgaccaccaccaggaccccagaactgtggagtcagtggcagcatgcagcgcccccttgggaaagctttaggcaccagcctgcaacccattcgagcagccacgtaggctgcacccagcaaagccacaggcacggggctacctgaggccttgggggcccaatccctgctccagtgtgtccgtgaggcagcacacgaagtcaaaagagattattctcttcccacagataccttttctctcccatgaccctttaacagcatctgcttcattcccctcaccttcccaggctgatctgaggtaaactttgaagtaaaataaaagctgtgtttgagcatcatttgtatttcaaaaaaaaaaaaaaaaaa

SEQ ID NO: 43 - DNA, 987 bp, Homo sapiens
aatataagtggaggcgtcgcgctggcgggcattcctgaagctgacagcattcgggccgagatgtctcgctccgtggccttagctgtgctcgcgctactctctctttctggcctggaggctatccagcgtactccaaagattcaggtttactcacgtcatccagcagagaatggaaagtcaaatttcctgaattgctatgtgtctgggtttcatccatccgacattgaagttgacttactgaagaatggagagagaattgaaaaagtggagcattcagacttgtctttcagcaaggactggtctttctatctcttgtactacactgaattcacccccactgaaaaagatgagtatgcctgccgtgtgaaccatgtgactttgtcacagcccaagatagttaagtgggatcgagacatgtaagcagcatcatggaggtttgaagatgccgcatttggattggatgaattccaaattctgcttgcttgctttttaatattgatatgcttatacacttacactttatgcacaaaatgtagggttataataatgttaacatggacatgatcttctttataattctactttgagtgctgtctccatgtttgatgtatctgagcaggttgctccacaggtagctctaggagggctggcaacttagaggtggggagcagagaattctcttatccaacatcaacatcttggtcagatttgaactcttcaatctcttgcactcaaagcttgttaagatagttaagcgtgcataagttaacttccaatttacatactctgcttagaatttgggggaaaatttagaaatataattgacaggattattggaaatttgttataatgaatgaaacattttgtcatataagattcatatttacttcttatacatttgataaagtaaggcatggttgtggttaatctggtttatttttgttccacaagttaaataaatcataaaacttgatgtgttatctctta

SEQ ID NO: 44 - DNA, 3349 bp, Homo sapiens
ggcgcaacgctgagcagctggcgcgtcccgcgcggccccagttctgcgcagcttcccgaggctccgcaccagccgcgcttctgtccgcctgcagggcattccagaaagatgaggatatttgctgtctttatattcatgacctactggcatttgctgaacgccccatacaacaaaatcaaccaaagaattttggttgtggatccagtcacctctgaacatgaactgacatgtcaggctgagggctaccccaaggccgaagtcatctggacaagcagtgaccatcaagtcctgagtggtaagaccaccaccaccaattccaagagagaggagaagcttttcaatgtgaccagcacactgagaatcaacacaacaactaatgagattttctactgcacttttaggagattagatcctgaggaaaaccatacagctgaattggtcatcccagaactacctctggcacatcctccaaatgaaaggactcacttggtaattctgggagccatcttattatgccttggtgtagcactgacattcatcttccgtttaagaaaagggagaatgatggatgtgaaaaaatgtggcatccaagatacaaactcaaagaagcaaagtgatacacatttggaggagacgtaatccagcattggaacttctgatcttcaagcagggattctcaacctgtggtttaggggttcatcggggctgagcgtgacaagaggaaggaatgggcccgtgggatgcaggcaatgtgggacttaaaaggcccaagcactgaaaatggaacctggcgaaagcagaggaggagaatgaagaaagatggagtcaaacagggagcctggagggagaccttgatactttcaaatgcctgaggggctcatcgacgcctgtgacagggagaaaggatacttctgaacaaggagcctccaagcaaatcatccattgctcatcctaggaagacgggttgagaatccctaatttgagggtcagttcctgcagaagtgccctttgcctccactcaatgcctcaatttgttttctgcatgactgagagtctcagtgttggaacgggacagtatttatgtatgagtttttcctatttattttgagtctgtgaggtcttcttgtcatgtgagtgtggttgtgaatgatttcttttgaagatatattgtagtagatgttacaattttgtcgccaaactaaacttgctgcttaatgatttgctcacatctagtaaaacatggagtatttgtaaggtgcttggtctcctctataactacaagtatacattggaagcataaagatcaaaccgttggttgcataggatgtcacctttatttaacccattaatactctggttgacctaatcttattctcagacctcaagtgtctgtgcagtatctgttccatttaaatatcagctttacaattatgtggtagcctacacacataatctcatttcatcgctgtaaccaccctgttgtgataaccactattattttacccatcgtacagctgaggaagcaaacagattaagtaacttgcccaaaccagtaaatagcagacctcagactgccacccactgtccttttataatacaatttacagctatattttactttaagcaattcttttattcaaaaaccatttattaagtgcccttgcaatatcaatcgctgtgccaggcattgaatctacagatgtgagcaagacaaagtacctgtcctcaaggagctcatagtataatgaggagattaacaagaaaatgtattattacaatttagtccagtgtcatagcataaggatgatgcgaggggaaaacccgagcagtgttgccaagaggaggaaataggccaatgtggtctgggacggttggatatacttaaacatcttaataatcagagtaattttcatttacaaagagaggtcggtacttaaaataaccctgaaaaataacactggaattccttttctagcattatatttattcctgatttgcctttgccatataatctaatgcttgtttatatagtgtctggtattgtttaacagttctgtcttttctatttaaatgccactaaattttaaattcatacctttccatgattcaaaattcaaaagatcccatgggagatggttggaaaatctccacttcatcctccaagccattcaagtttcctttccagaagcaactgctactgcctttcattcatatgttcttctaaagatagtctacatttggaaatgtatgttaaaagcacgtatttttaaaatttttttcctaaatagtaacacattgtatgtctgctgtgtactttgctatttttatttattttagtgtttcttatatagcagatggaatgaatttgaagttcccagggctgaggatccatgccttctttgtttctaagttatctttcccatagcttttcattatctttcatatgatccagtatatgttaaatatgtcctacatatacatttagacaaccaccatttgttaagtatttgctctaggacagagtttggatttgtttatgtttgctcaaaaggagacccatgggctctccagggtgcactgagtcaatctagtcctaaaaagcaatcttattattaactctgtatgacagaatcatgtctggaacttttgttttctgctttctgtcaagtataaacttcactttgatgctgtacttgcaaaatcacattttctttctggaaattccggcagtgtaccttgactgctagctaccctgtgccagaaaagcctcattcgttgtgcttgaacccttgaatgccaccagctgtcatcactacacagccctcctaagaggcttcctggaggtttcgagattcagatgccctgggagatcccagagtttcctttccctcttggccatattctggtgtcaatgacaaggagtaccttggctttgccacatgtcaaggctgaagaaacagtgtctccaacagagctccttgtgttatctgtttgtacatgtgcatttgtacagtaattggtgtgacagtgttctttgtgtgaattacaggcaagaattgtggctgagcaaggcacatagtctactcagtctattcctaagtcctaactcctccttgtggtgttggatttgtaaggcactttatcccttttgtctcatgtttcatcgtaaatggcataggcagagatgatacctaattctgcatttgattgtcactttttgtacctgcattaatttaataaaatattcttatttattttgttacttggtacaccagcatgtccattttcttgtttattttgtgtttaataaaatgttcagtttaacatcccagtggagaaagttaaaaaa

SEQ ID NO: 45 - DNA, 2418 bp, Homo sapiens
gcaaaccttaagctgaatgaacaacttttcttctcttgaatatatcttaacgccaaattttgagtgcttttttgttacccatcctcatatgtcccagctagaaagaatcctgggttggagctactgcatgttgattgttttgtttttccttttggctgttcattttggtggctactataaggaaatctaacacaaacagcaactgttttttgttgtttacttttgcatctttacttgtggagctgtggcaagtcctcatatcaaatacagaacatgatcttcctcctgctaatgttgagcctggaattgcagcttcaccagatagcagctttattcacagtgacagtccctaaggaactgtacataatagagcatggcagcaatgtgaccctggaatgcaactttgacactggaagtcatgtgaaccttggagcaataacagccagtttgcaaaaggtggaaaatgatacatccccacaccgtgaaagagccactttgctggaggagcagctgcccctagggaaggcctcgttccacatacctcaagtccaagtgagggacgaaggacagtaccaatgcataatcatctatggggtcgcctgggactacaagtacctgactctgaaagtcaaagcttcctacaggaaaataaacactcacatcctaaaggttccagaaacagatgaggtagagctcacctgccaggctacaggttatcctctggcagaagtatcctggccaaacgtcagcgttcctgccaacaccagccactccaggacccctgaaggcctctaccaggtcaccagtgttctgcgcctaaagccaccccctggcagaaacttcagctgtgtgttctggaatactcacgtgagggaacttactttggccagcattgaccttcaaagtcagatggaacccaggacccatccaacttggctgcttcacattttcatccccttctgcatcattgctttcattttcatagccacagtgatagccctaagaaaacaactctgtcaaaagctgtattcttcaaaagacacaacaaaaagacctgtcaccacaacaaagagggaagtgaacagtgctatctgaacctgtggtcttgggagccagggtgacctgatatgacatctaaagaagcttctggactctgaacaagaattcggtggcctgcagagcttgccatttgcacttttcaaatgcctttggatgacccagcactttaatctgaaacctgcaacaagactagccaacacctggccatgaaacttgccccttcactgatctggactcacctctggagcctatggctttaagcaagcactactgcactttacagaattaccccactggatcctggacccacagaattccttcaggatccttcttgctgccagactgaaagcaaaaggaattatttcccctcaagttttctaagtgatttccaaaagcagaggtgtgtggaaatttccagtaacagaaacagatgggttgccaatagagttattttttatctatagcttcctctgggtactagaagaggctattgagactatgagctcacagacagggcttcgcacaaactcaaatcataattgacatgttttatggattactggaatcttgatagcataatgaagttgttctaattaacagagagcatttaaatatacactaagtgcacaaattgtggagtaaagtcatcaagctctgtttttgaggtctaagtcacaaagcatttgttttaacctgtaatggcaccatgtttaatggtggttttttttttgaactacatctttcctttaaaaattattggtttctttttatttgtttttaccttagaaatcaattatatacagtcaaaaatatttgatatgctcatacgttgtatctgcagcaatttcagataagtagctaaaatggccaaagccccaaactaagcctccttttctggccctcaatatgactttaaatttgacttttcagtgcctcagtttgcacatctgtaatacagcaatgctaagtagtcaaggcctttgataattggcactatggaaatcctgcaagatcccactacatatgtgtggagcagaagggtaactcggctacagtaacagcttaattttgttaaatttgttctttatactggagccatgaagctcagagcattagctgacccttgaactattcaaatgggcacattagctagtataacagacttacataggtgggcctaaagcaagctccttaactgagcaaaatttggggcttatgagaatgaaagggtgtgaaattgactaacagacaaatcatacatctcagtttctcaattctcatgtaaatcagagaatgcctttaaagaataaaactcaattgttattcttcaacgttctttatatattctacttttgggta

SEQ ID NO: 46 - DNA, 4167 bp, Homo sapiens
agcgggagtccgcggcgagcgcagcagcagggccgggtcctgcgcctcgggggtcggcgtccaggctcggagcgcggcacggagacggcggcagcgctggactaggtggcaggccctgcatcatggaaactctttctaatgcaagtggtacttttgccatacgccttttaaagatactgtgtcaagataacccttcgcacaacgtgttctgttctcctgtgagcatctcctctgccctggccatggttctcctaggggcaaagggaaacaccgcaacccagatggcccaggcactgtctttaaacacagaggaagacattcatcgggctttccagtcgcttctcactgaagtgaacaaggctggcacacagtacctgctgagaacggccaacaggctctttggagagaaaacttgtcagttcctctcaacgtttaaggaatcctgtcttcaattctaccatgctgagctgaaggagctttcctttatcagagctgcagaagagtccaggaaacacatcaacacctgggtctcaaaaaagaccgaaggtaaaattgaagagttgttgccgggtagctcaattgatgcagaaaccaggctggttcttgtcaatgccatctacttcaaaggaaagtggaatgaaccgtttgacgaaacatacacaagggaaatgccctttaaaataaaccaggaggagcaaaggccagtgcagatgatgtatcaggaggccacgtttaagctcgcccacgtgggcgaggtgcgcgcgcagctgctggagctgccctacgccaggaaggagctgagcctgctggtgctgctgcctgacgacggcgtggagctcagcacggtggaaaaaagtctcacttttgagaaactcacagcctggaccaagccagactgtatgaagagtactgaggttgaagttctccttccaaaatttaaactacaagaggattatgacatggaatctgtgcttcggcatttgggaattgttgatgccttccaacagggcaaggctgacttgtcggcaatgtcagcggagagagacctgtgtctgtccaagttcgtgcacaagagttttgtggaggtgaatgaagaaggcaccgaggcagcggcagcgtcgagctgctttgtagttgcagagtgctgcatggaatctggccccaggttctgtgctgaccaccctttccttttcttcatcaggcacaacagagccaacagcattctgttctgtggcaggttctcatcgccataaagggtgcacttaccgtgcactcggccatttccctcttcctgtgtccccagatccccactacagctccaagaggatgggcctagaaagccaagtgcaaagatgagggcagattctttacctgtctgccctcatgatttgccagcatgaattcatgatgctccacactcgcttatgctacttaatcagaatcttgagaaaatagaccataatgattccctgttgtattaaaattgcagtccaaatcccataggatggcaagcaaagttcttctagaattccacatgcaattcactctggcgaccctgtgctttcctgacactgcgaatacattccttaacccgctgcctcagtggtaataaatggtgctagatattgctactattttatagatttcctggtgcttagccttataaaaaaggttgtaaaatgtacatttatattttatcttttttttttttttttttctgagacgcagtctggctctctgtcgcccaggctggagtgcagtggctcgatctcggctcactgcaagctccgcctcccgggttcacgccattctcctgcctcagcctcccgagtagctgggactacaggcgcccgccaccacgcccggctaattttttgtatttttagtagagacggggtttcaccgtgttagccaggatggtgtcgatctcctgacctcgtgatccacccgcctcggcctcccaaagtgctgggattacaggcttgagccaccgcgcccggctatattttatcttttatctttttctttgacatttaccaatcaccaagcatgcaccaaacactgctttaggcactggggacacaaaggggacagagccatcctcctttgacacctggtcttcagttctgtgcccaacgtatatagttttgacaatgaccaggttggactgtttaatgtctttcaacttaccacgtaatcctcttgtagggatcacatctttctttatgatattgtatttctctacctctaacagtaaaaattccattcaacccttaaagctcacttcaaattcttctttgagaagtttttcctttctccgcaaccagatgtacatatttgaactctctttgtacttggagggcacttctttcgtggtagttcttttatttttattaatctctgtatccttagatagtcctccaacaaccaaaggttgggactctgtcttacatatctgggtgcccctcatagtgcagtaataagtaagttgattatatacgagctatgtaacttatattttttaatggttggatatcactgagtttttttttttaagaatttttttattgaggtaaacttcacataacataaaattaactattttaaagtgagaagttcagtgccacttagtattgttaacaatgttgcataaccaccacctttatttaaagttccaaaaaaaatgttctcctctaaaaggaaaccccatcccattaagcagatactctccattccttccttcctccagcccccagcaaccaccaatctgctttctgtctctatggatttatctattcttgctattttatataaattgaattgtatgagaccttttgtgtctggcttctttcacttagtacaagtttttgagatttatttacatagtagcatgtatcaacacttcatttttatggccaaataaaattgtattatgtgtttatagcacaatttatttatccactcattcattgatggactttgggttgtttctgacttttggctattgggaatagtgctgctatgaatgtttgtgtacctgtatttgtttgaatgcctattttgcattctcttgggtatatatctaggagtggaactgctgggtcatatgttaattctatgtttagctttttgaggaacagacaaactgttttccacagcagttgaaccattccacattcccaccagcaatgtatgagaattccaatttctgtccacttcctcaccaacacttattattttccttttcctttttttaaaaaaaataagttatggccatcttagtgggtgtgaagtggtatctcattgtgttttttatttgcatttcctatgtaatgagctagaaactaaagtacaaactagatgggacatccagtccctttgatagataatgctgagtaaaaaatgagatgaaagacatttgtttgtttttagaacacgagtgacagtttgttaaaaagctttagaggaggaatgaaaacaaagtgaagtacacttagaaaagggccaagtggacatcttggatgtcaagtgcctagttcagtatcttttttttttttttttttttttttgagacagtgcctcactctgtcacccaggctggagtgtagtggcatgatctgggctcactgcaacctcctcctcctggattcaagcaattctcttgcttcagcctcccaagtagctgagactacaagcacccaccatcacacccagctaattttgtatttttcagtagagacggggtttcgccacattggccgtgttggtcttgaactcctggcctcaagcgatccgcctacctcagcctcccaaagtgctaggattacaggcataagccactgagcccagccctagttcagtatcttttatgtaaattacaaacatctgcaacattatgtatcatatgcagatacttattgcatttcttttattagtggtgaaagtgttctatgcatttattggctcttgaatttcctcatctatgaattgtcattcatacacctacttttctgcttcgtttttacatatgtctttgcctattaaagatattatccctctgttttatattttctctcattcttgtattgccttttaaattttgttatgatgtttcattaataaacagtgttttgttttcctctataatcaaaaaaaaaaaaaaaaaaa

SEQ ID NO: 47 - DNA, 5346 bp, Homo sapiens
ggggagcaggcgggggagcgggcgggaagcagtgggagcgcgcgtgcgcgcggccgtgcagcctgggcagtgggtcctgcctgtgacgcgcggcggcggtcggtcctgcctgtaacggcggcggcggctgctgctccagacacctgcggcggcggcggcgaccccgcggcgggcgcggagatgtggcccctggtagcggcgctgttgctgggctcggcgtgctgcggatcagctcagctactatttaataaaacaaaatctgtagaattcacgttttgtaatgacactgtcgtcattccatgctttgttactaatatggaggcacaaaacactactgaagtatacgtaaagtggaaatttaaaggaagagatatttacacctttgatggagctctaaacaagtccactgtccccactgactttagtagtgcaaaaattgaagtctcacaattactaaaaggagatgcctctttgaagatggataagagtgatgctgtctcacacacaggaaactacacttgtgaagtaacagaattaaccagagaaggtgaaacgatcatcgagctaaaatatcgtgttgtttcatggttttctccaaatgaaaatattcttattgttattttcccaatttttgctatactcctgttctggggacagtttggtattaaaacacttaaatatagatccggtggtatggatgagaaaacaattgctttacttgttgctggactagtgatcactgtcattgtcattgttggagccattcttttcgtcccaggtgaatattcattaaagaatgctactggccttggtttaattgtgacttctacagggatattaatattacttcactactatgtgtttagtacagcgattggattaacctccttcgtcattgccatattggttattcaggtgatagcctatatcctcgctgtggttggactgagtctctgtattgcggcgtgtataccaatgcatggccctcttctgatttcaggtttgagtatcttagctctagcacaattacttggactagtttatatgaaatttgtggcttccaatcagaagactatacaacctcctaggaaagctgtagaggaaccccttaatgcattcaaagaatcaaaaggaatgatgaatgatgaataactgaagtgaagtgatggactccgatttggagagtagtaagacgtgaaaggaatacacttgtgtttaagcaccatggccttgatgattcactgttggggagaagaaacaagaaaagtaactggttgtcacctatgagacccttacgtgattgttagttaagtttttattcaaagcagctgtaatttagttaataaaataattatgatctatgttgtttgcccaattgagatccagttttttgttgttatttttaatcaattaggggcaatagtagaatggacaatttccaagaatgatgcctttcaggtcctagggcctctggcctctaggtaaccagtttaaattggttcagggtgataactacttagcactgccctggtgattacccagagatatctatgaaaaccagtggcttccatcaaacctttgccaactcaggttcacagcagctttgggcagttatggcagtatggcattagctgagaggtgtctgccacttctgggtcaatggaataataaattaagtacaggcaggaatttggttgggagcatcttgtatgatctccgtatgatgtgatattgatggagatagtggtcctcattcttgggggttgccattcccacattcccccttcaacaaacagtgtaacaggtccttcccagatttagggtacttttattgatggatatgttttccttttattcacataaccccttgaaaccctgtcttgtcctcctgttacttgcttctgctgtacaagatgtagcaccttttctcctctttgaacatggtctagtgacacggtagcaccagttgcaggaaggagccagacttgttctcagagcactgtgttcacacttttcagcaaaaatagctatggttgtaacatatgtattcccttcctctgatttgaaggcaaaaatctacagtgtttcttcacttcttttctgatctggggcatgaaaaaagcaagattgaaatttgaactatgagtctcctgcatggcaacaaaatgtgtgtcaccatcaggccaacaggccagcccttgaatggggatttattactgttgtatctatgttgcatgataaacattcatcaccttcctcctgtagtcctgcctcgtactccccttcccctatgattgaaaagtaaacaaaacccacatttcctatcctggttagaagaaaattaatgttctgacagttgtgatcgcctggagtacttttagacttttagcattcgttttttacctgtttgtggatgtgtgtttgtatgtgcatacgtatgagataggcacatgcatcttctgtatggacaaaggtggggtacctacaggagagcaaaggttaattttgtgcttttagtaaaaacatttaaatacaaagttctttattgggtggaattatatttgatgcaaatatttgatcacttaaaacttttaaaacttctaggtaatttgccacgctttttgactgctcaccaataccctgtaaaaatacgtaattcttcctgtttgtgtaataagatattcatatttgtagttgcattaataatagttatttcttagtccatcagatgttcccgtgtgcctcttttatgccaaattgattgtcatatttcatgttgggaccaagtagtttgcccatggcaaacctaaatttatgacctgctgaggcctctcagaaaactgagcatactagcaagacagctcttcttgaaaaaaaaaatatgtatacacaaatatatacgtatatctatatatacgtatgtatatacacacatgtatattcttccttgattgtgtagctgtccaaaataataacatatatagagggagctgtattcctttatacaaatctgatggctcctgcagcactttttccttctgaaaatatttacattttgctaacctagtttgttactttaaaaatcagttttgatgaaaggagggaaaagcagatggacttgaaaaagatccaagctcctattagaaaaggtatgaaaatctttatagtaaaattttttataaactaaagttgtaccttttaatatgtagtaaactctcatttatttggggttcgctcttggatctcatccatccattgtgttctctttaatgctgcctgccttttgaggcattcactgccctagacaatgccaccagagatagtgggggaaatgccagatgaaaccaactcttgctctcactagttgtcagcttctctggataagtgaccacagaagcaggagtcctcctgcttgggcatcattgggccagttccttctctttaaatcagatttgtaatggctcccaaattccatcacatcacatttaaattgcagacagtgttttgcacatcatgtatctgttttgtcccataatatgctttttactccctgatcccagtttctgctgttgactcttccattcagttttatttattgtgtgttctcacagtgacaccatttgtccttttctgcaacaacctttccagctacttttgccaaattctatttgtcttctccttcaaaacattctcctttgcagttcctcttcatctgtgtagctgctcttttgtctcttaacttaccattcctatagtactttatgcatctctgcttagttctattagttttttggccttgctcttctccttgattttaaaattccttctatagctagagcttttctttctttcattctctcttcctgcagtgttttgcatacatcagaagctaggtacataagttaaatgattgagagttggctgtatttagatttatcactttttaatagggtgagcttgagagttttctttctttctgttttttttttttgttttttttttttttttttttttttttttttttgactaatttcacatgctctaaaaaccttcaaaggtgattatttttctcctggaaactccaggtccattctgtttaaatccctaagaatgtcagaattaaaataacagggctatcccgtaattggaaatatttcttttttcaggatgctatagtcaatttagtaagtgaccaccaaattgttatttgcactaacaaagctcaaaacacgataagtttactcctccatctcagtaataaaaattaagctgtaatcaaccttctaggtttctcttgtcttaaaatgggtattcaaaaatggggatctgtggtgtatgtatggaaacacatactccttaatttacctgttgttggaaactggagaaatgattgtcgggcaaccgtttattttttattgtattttatttggttgagggatttttttataaacagttttacttgtgtcatattttaaaattactaactgccatcacctgctggggtcctttgttaggtcattttcagtgactaatagggataatccaggtaactttgaagagatgagcagtgagtgaccaggcagtttttctgcctttagctttgacagttcttaattaagatcattgaagaccagctttctcataaatttctctttttgaaaaaaagaaagcatttgtactaagctcctctgtaagacaacatcttaaatcttaaaagtgttgttatcatgactggtgagagaagaaaacattttgtttttattaaatggagcattatttacaaaaagccattgttgagaattagatcccacatcgtataaatatctattaaccattctaaataaagagaactccagtgttgctatgtgcaagatcctctcttggagcttttttgcatagcaattaaaggtgtgctatttgtcagtagccatttttttgcagtgatttgaagaccaaagttgttttacagctgtgttaccgttaaaggtttttttttttatatgtattaaatcaatttatcactgtttaaagctttgaatatctgcaatctttgccaaggtacttttttatttaaaaaaaaacataactttgtaaatattaccctgtaatattatatatacttaataaaacattttaagctattttgttgggctatttctattgctgctacagcagaccacaagcacatttctgaaaaatttaatttattaatgtatttttaagttgcttatattctaggtaacaatgtaaagaatgatttaaaatattaattatgaattttttgagtataatacccaataagcttttaattagagcagagttttaattaaaagttttaaatcagtc

SEQ ID NO: 48 - DNA, 1835 bp, Homo sapiens
tccccattgaataacagccaagttgctttggtttctatttctttgttaagtcgttccctctacaaaggacttcctagtgggtgtgaaaggcagcggtggccacagaggcggcggagagatggccttcagcggttcccaggctccctacctgagtccagctgtccccttttctgggactattcaaggaggtctccaggacggacttcagatcactgtcaatgggaccgttctcagctccagtggaaccaggtttgctgtgaactttcagactggcttcagtggaaatgacattgccttccacttcaaccctcggtttgaagatggagggtacgtggtgtgcaacacgaggcagaacggaagctgggggcccgaggagaggaagacacacatgcctttccagaaggggatgccctttgacctctgcttcctggtgcagagctcagatttcaaggtgatggtgaacgggatcctcttcgtgcagtacttccaccgcgtgcccttccaccgtgtggacaccatctccgtcaatggctctgtgcagctgtcctacatcagcttccagaacccccgcacagtccctgttcagcctgccttctccacggtgccgttctcccagcctgtctgtttcccacccaggcccagggggcgcagacaaaaacctcccggcgtgtggcctgccaacccggctcccattacccagacagtcatccacacagtgcagagcgcccctggacagatgttctctactcccgccatcccacctatgatgtacccccaccccgcctatccgatgcctttcatcaccaccattctgggagggctgtacccatccaagtccatcctcctgtcaggcactgtcctgcccagtgctcagaggttccacatcaacctgtgctctgggaaccacatcgccttccacctgaacccccgttttgatgagaatgctgtggtccgcaacacccagatcgacaactcctgggggtctgaggagcgaagtctgccccgaaaaatgcccttcgtccgtggccagagcttctcagtgtggatcttgtgtgaagctcactgcctcaaggtggccgtggatggtcagcacctgtttgaatactaccatcgcctgaggaacctgcccaccatcaacagactggaagtggggggcgacatccagctgacccatgtgcagacataggcggcttcctggccctggggccgggggctggggtgtggggcagtctgggtcctctcatcatccccacttcccaggcccagcctttccaaccctgcctgggatctgggctttaatgcagaggccatgtccttgtctggtcctgcttctggctacagccaccctggaacggagaaggcagctgacggggattgccttcctcagccgcagcagcacctggggctccagctgctggaatcctaccatcccaggaggcaggcacagccagggagaggggaggagtgggcagtgaagatgaagccccatgctcagtcccctcccatcccccacgcagctccaccccagtcccaagccaccagctgtctgctcctggtgggaggtggcctcctcagcccctcctctctgacctttaacctcactctcaccttgcaccgtgcaccaacccttcacccctcctggaaagcaggcctgatggcttcccactggcctccaccacctgaccagagtgttctcttcagaggactggctcctttcccagtgtccttaaaataaagaaatgaaaatgcttgttggcacattcaaaaaaaaaaaaaaaaaaaaaaaaaaaaaaaaaaaaaaaaaaaaaaaaaaaaaaaaaaaaaaaaaaaaaaaa

SEQ ID NO: 49 - protein, 363 aa, Sus scrofa
MMAFCALRKALPCRPENPFSSRCFVEILWVSLALVFLLPMPSDACDEPPKFESMRPQFLNTTYRPGDRVEYECRPGFQPMVPALPTFSVCQDDNTWSPLQEACRRKACSNLPDPLNGQVSYPNGDMLFGSKAQFTCNTGFYIIGAETVYCQVSGNVMAWSEPSPLCEKILCKPPGEIPNGKYTNSHKDVFEYNEVVTYSCLSSTGPDEFSLVGESSLFCIGKDEWSSDPPECKVVKCPYPVVPNGEIVSGFGSKFYYKAEVVFKCNAGFTLHGRDTIVCGANSTWEPEMPQCIKDSKPTDPPATPGPSHPGPPSPSDASPPKDAESLDGGIIAAIVVGVLAAIAVIAGGVYFFHHKYNKKRSK

SEQ ID NO: 50 - protein, 341 aa, Sus scrofa
MSPLPRSAPAVRRLMGGQTPPPLLLLLLLLCIPAAQGDCSLPPDVPNAQPDLRGLASFPEQTTITYKCNKGFVKVPGMADSVLCLNDKWSEVAEFCNRSCDVPTRLHFASLKKSYSKQNYFPEGFTVEYECRKGYKRDLTLSEKLTCLQNFTWSKPDEFCKKKQCPTPGELKNGHVNITTDLLFGASIFFSCNAGYRLVGATSSYCFAIANDVEWSDPLPECQEISPTVKAIPAVEKPITVNFPATKYPAIPRATTSFHSSTSKNRGNPSSGMRIMSSGTMLLIAGGVAVIIIIVALILAKGFWHYGKSGSYHTHENNKAVNVAFYNLPATGDAADVRPGN

SEQ ID NO: 51 - protein, 123 aa, Sus scrofa
MGSKGGFILLWLLSILAVLCHLGHSLQCYNCINPAGSCTTAMNCSHNQDACIFVEAVPPKTYYQCWRFDECNFDFISRNLAEKKLKYNCCRKDLCNKSDATISSGKTALLVILLLVATWHFCL

SEQ ID NO: 52 - protein, 86 aa, Human herpesvirus 2
MSWALKTTDMFLDSSRCTHRTYGDVCAEIHKREREDREAARTAVTDPELPLLCPPDVRSDPASRNPTQQTRGCARSNERQDRVLAP

SEQ ID NO: 53 - protein, 338 aa, Homo sapiens
MVVMAPRTLFLLLSGALTLTETWAGSHSMRYFSAAVSRPGRGEPRFIAMGYVDDTQFVRFDSDSACPRMEPRAPWVEQEGPEYWEEETRNTKAHAQTDRMNLQTLRGYYNQSEASSHTLQWMIGCDLGSDGRLLRGYEQYAYDGKDYLALNEDLRSWTAADTAAQISKRKCEAANVAEQRRAYLEGTCVEWLHRYLENGKEMLQRADPPKTHVTHHPVFDYEATLRCWALGFYPAEIILTWQRDGEDQTQDVELVETRPAGDGTFQKWAAVVVPSGEEQRYTCHVQHEGLPEPLMLRWKQSSLPTIPIMGIVAGLVVLAAVVTGAAVAAVLWRKKSSD

SEQ ID NO: 54 - protein, 358 aa, Homo sapiens
MVDGTLLLLLSEALALTQTWAGSHSLKYFHTSVSRPGRGEPRFISVGYVDDTQFVRFDNDAASPRMVPRAPWMEQEGSEYWDRETRSARDTAQIFRVNLRTLRGYYNQSEAGSHTLQWMHGCELGPDGRFLRGYEQFAYDGKDYLTLNEDLRSWTAVDTAAQISEQKSNDASEAEHQRAYLEDTCVEWLHKYLEKGKETLLHLEPPKTHVTHHPISDHEATLRCWALGFYPAEITLTWQQDGEGHTQDTELVETRPAGDGTFQKWAAVVVPSGEEQRYTCHVQHEGLPEPVTLRWKPASQPTIPIVGIIAGLVLLGSVVSGAVVAAVIWRKKSSGGKGGSYSKAEWSDSAQGSESHSL

SEQ ID NO: 55 - protein, 119 aa, Homo sapiens
MSRSVALAVLALLSLSGLEAIQRTPKIQVYSRHPAENGKSNFLNCYVSGFHPSDIEVDLLKNGERIEKVEHSDLSFSKDWSFYLLYYTEFTPTEKDEYACRVNHVTLSQPKIVKWDRDM

SEQ ID NO: 56 - protein, 176 aa, Homo sapiens
MRIFAVFIFMTYWHLLNAPYNKINQRILVVDPVTSEHELTCQAEGYPKAEVIWTSSDHQVLSGKTTTTNSKREEKLFNVTSTLRINTTTNEIFYCTFRRLDPEENHTAELVIPELPLAHPPNERTHLVILGAILLCLGVALTFIFRLRKGRMMDVKKCGIQDTNSKKQSDTHLEET

SEQ ID NO: 57 - protein, 273 aa, Homo sapiens
MIFLLLMLSLELQLHQIAALFTVTVPKELYIIEHGSNVTLECNFDTGSHVNLGAITASLQKVENDTSPHRERATLLEEQLPLGKASFHIPQVQVRDEGQYQCIIIYGVAWDYKYLTLKVKASYRKINTHILKVPETDEVELTCQATGYPLAEVSWPNVSVPANTSHSRTPEGLYQVTSVLRLKPPPGRNFSCVFWNTHVRELTLASIDLQSQMEPRTHPTWLLHIFIPFCIIAFIFIATVIALRKQLCQKLYSSKDTTKRPVTTTKREVNSAI

SEQ ID NO: 58 - protein, 376 aa, Homo sapiens
METLSNASGTFAIRLLKILCQDNPSHNVFCSPVSISSALAMVLLGAKGNTATQMAQALSLNTEEDIHRAFQSLLTEVNKAGTQYLLRTANRLFGEKTCQFLSTFKESCLQFYHAELKELSFIRAAEESRKHINTWVSKKTEGKIEELLPGSSIDAETRLVLVNAIYFKGKWNEPFDETYTREMPFKINQEEQRPVQMMYQEATFKLAHVGEVRAQLLELPYARKELSLLVLLPDDGVELSTVEKSLTFEKLTAWTKPDCMKSTEVEVLLPKFKLQEDYDMESVLRHLGIVDAFQQGKADLSAMSAERDLCLSKFVHKSFVEVNEEGTEAAAASSCFVVAECCMESGPRFCADHPFLFFIRHNRANSILFCGRFSSP

SEQ ID NO: 59 - protein, 323 aa, Homo sapiens
MWPLVAALLLGSACCGSAQLLFNKTKSVEFTFCNDTVVIPCFVTNMEAQNTTEVYVKWKFKGRDIYTFDGALNKSTVPTDFSSAKIEVSQLLKGDASLKMDKSDAVSHTGNYTCEVTELTREGETIIELKYRVVSWFSPNENILIVIFPIFAILLFWGQFGIKTLKYRSGGMDEKTIALLVAGLVITVIVIVGAILFVPGEYSLKNATGLGLIVTSTGILILLHYYVFSTAIGLTSFVIAILVIQVIAYILAVVGLSLCIAACIPMHGPLLISGLSILALAQLLGLVYMKFVASNQKTIQPPRKAVEEPLNAFKESKGMMNDE

SEQ ID NO: 60 - protein, 355 aa, Homo sapiens
MAFSGSQAPYLSPAVPFSGTIQGGLQDGLQITVNGTVLSSSGTRFAVNFQTGFSGNDIAFHFNPRFEDGGYVVCNTRQNGSWGPEERKTHMPFQKGMPFDLCFLVQSSDFKVMVNGILFVQYFHRVPFHRVDTISVNGSVQLSYISFQNPRTVPVQPAFSTVPFSQPVCFPPRPRGRRQKPPGVWPANPAPITQTVIHTVQSAPGQMFSTPAIPPMMYPHPAYPMPFITTILGGLYPSKSILLSGTVLPSAQRFHINLCSGNHIAFHLNPRFDENAVVRNTQIDNSWGSEERSLPRKMPFVRGQSFSVWILCEAHCLKVAVDGQHLFEYYHRLRNLPTINRLEVGGDIQLTHVQT

SEQ ID NO: 61 - DNA, 20 bp, Artificial Sequence
  Description of Artificial Sequence: Synthetic oligonucleotide
ggggaggaagaacttcacct

SEQ ID NO: 62 - DNA, 20 bp, Artificial Sequence
  Description of Artificial Sequence: Synthetic oligonucleotide
gtaggacgaccctctgtgtg

SEQ ID NO: 63 - DNA, 20 bp, Artificial Sequence
  Description of Artificial Sequence: Synthetic oligonucleotide
gaccctctgtgtggggtctg

SEQ ID NO: 64 - DNA, 20 bp, Artificial Sequence
  Description of Artificial Sequence: Synthetic oligonucleotide
ggctcggttccattgcaaga

SEQ ID NO: 65 - DNA, 20 bp, Artificial Sequence
  Description of Artificial Sequence: Synthetic oligonucleotide
gctcggttccattgcaagat

SEQ ID NO: 66 - DNA, 20 bp, Artificial Sequence
  Description of Artificial Sequence: Synthetic oligonucleotide
ggttccattgcaagatgggc

SEQ ID NO: 67 - DNA, 20 bp, Artificial Sequence
  Description of Artificial Sequence: Synthetic oligonucleotide
gtcccctcctgagtgtcgaa

SEQ ID NO: 68 - DNA, 20 bp, Artificial Sequence
  Description of Artificial Sequence: Synthetic oligonucleotide
gcctcaggtacagatcaaaa

SEQ ID NO: 69 - DNA, 20 bp, Artificial Sequence
  Description of Artificial Sequence: Synthetic oligonucleotide
ggacctgggtgccaggaacg

SEQ ID NO: 70 - DNA, 20 bp, Artificial Sequence
  Description of Artificial Sequence: Synthetic oligonucleotide
gtacccagagtcagatcacc

SEQ ID NO: 71 - DNA, 20 bp, Artificial Sequence
  Description of Artificial Sequence: Synthetic oligonucleotide
gtacccagagtcagatcacc

SEQ ID NO: 72 - DNA, 20 bp, Artificial Sequence
  Description of Artificial Sequence: Synthetic oligonucleotide
gtgcccttcgacactcagga

SEQ ID NO: 73 - DNA, 20 bp, Artificial Sequence
  Description of Artificial Sequence: Synthetic oligonucleotide
gtgcccttcgacactcagga

SEQ ID NO: 74 - DNA, 20 bp, Artificial Sequence
  Description of Artificial Sequence: Synthetic oligonucleotide
gtgcccttcgacactcagga

SEQ ID NO: 75 - DNA, 20 bp, Artificial Sequence
  Description of Artificial Sequence: Synthetic oligonucleotide
gggggccccaaggcagaaga

SEQ ID NO: 76 - DNA, 20 bp, Artificial Sequence
  Description of Artificial Sequence: Synthetic oligonucleotide
ggcagtcttccagtacctgg

SEQ ID NO: 77 - DNA, 26 bp, Artificial Sequence
  Description of Artificial Sequence: Synthetic oligonucleotide
acaccggggaggaagaacttcacctg

SEQ ID NO: 78 - DNA, 26 bp, Artificial Sequence
  Description of Artificial Sequence: Synthetic oligonucleotide
aaaacaggtgaagttcttcctccccg

SEQ ID NO: 79 - DNA, 26 bp, Artificial Sequence
  Description of Artificial Sequence: Synthetic oligonucleotide
acaccgtaggacgaccctctgtgtgg

SEQ ID NO: 80 - DNA, 26 bp, Artificial Sequence
  Description of Artificial Sequence: Synthetic oligonucleotide
aaaaccacacagagggtcgtcctacg

SEQ ID NO: 81 - DNA, 26 bp, Artificial Sequence
  Description of Artificial Sequence: Synthetic oligonucleotide
acaccgaccctctgtgtggggtctgg

SEQ ID NO: 82 - DNA, 26 bp, Artificial Sequence
  Description of Artificial Sequence: Synthetic oligonucleotide
aaaaccagaccccacacagagggtcg

SEQ ID NO: 83 - DNA, 26 bp, Artificial Sequence
  Description of Artificial Sequence: Synthetic oligonucleotide
acaccggctcggttccattgcaagag

SEQ ID NO: 84 - DNA, 26 bp, Artificial Sequence
  Description of Artificial Sequence: Synthetic oligonucleotide
aaaactcttgcaatggaaccgagccg

SEQ ID NO: 85 - DNA, 26 bp, Artificial Sequence
  Description of Artificial Sequence: Synthetic oligonucleotide
acaccgctcggttccattgcaagatg

SEQ ID NO: 86 - DNA, 26 bp, Artificial Sequence
  Description of Artificial Sequence: Synthetic oligonucleotide
aaaacatcttgcaatggaaccgagcg

SEQ ID NO: 87 - DNA, 26 bp, Artificial Sequence
  Description of Artificial Sequence: Synthetic oligonucleotide
acaccggttccattgcaagatgggcg

SEQ ID NO: 88 - DNA, 26 bp, Artificial Sequence
  Description of Artificial Sequence: Synthetic oligonucleotide
aaaacgcccatcttgcaatggaaccg

SEQ ID NO: 89 - DNA, 26 bp, Artificial Sequence
  Description of Artificial Sequence: Synthetic oligonucleotide
acaccgtcccctcctgagtgtcgaag

SEQ ID NO: 90 - DNA, 26 bp, Artificial Sequence
  Description of Artificial Sequence: Synthetic oligonucleotide
aaaacttcgacactcaggaggggacg

SEQ ID NO: 91 - DNA, 26 bp, Artificial Sequence
  Description of Artificial Sequence: Synthetic oligonucleotide
acaccgcctcaggtacagatcaaaag

SEQ ID NO: 92 - DNA, 26 bp, Artificial Sequence
  Description of Artificial Sequence: Synthetic oligonucleotide
aaaacttttgatctgtacctgaggcg

SEQ ID NO: 93 - DNA, 26 bp, Artificial Sequence
  Description of Artificial Sequence: Synthetic oligonucleotide
acaccggacctgggtgccaggaacgg

SEQ ID NO: 94 - DNA, 26 bp, Artificial Sequence
  Description of Artificial Sequence: Synthetic oligonucleotide
aaaaccgttcctggcacccaggtccg

SEQ ID NO: 95 - DNA, 26 bp, Artificial Sequence
  Description of Artificial Sequence: Synthetic oligonucleotide
acaccgtacccagagtcagatcaccg

SEQ ID NO: 96 - DNA, 26 bp, Artificial Sequence
  Description of Artificial Sequence: Synthetic oligonucleotide
aaaacggtgatctgactctgggtacg

SEQ ID NO: 97 - DNA, 26 bp, Artificial Sequence
  Description of Artificial Sequence: Synthetic oligonucleotide
acaccgtacccagagtcagatcaccg

SEQ ID NO: 98 - DNA, 26 bp, Artificial Sequence
  Description of Artificial Sequence: Synthetic oligonucleotide
aaaacggtgatctgactctgggtacg

SEQ ID NO: 99 - DNA, 26 bp, Artificial Sequence
  Description of Artificial Sequence: Synthetic oligonucleotide
acaccgtgcccttcgacactcaggag

SEQ ID NO: 100 - DNA, 26 bp, Artificial Sequence
  Description of Artificial Sequence: Synthetic oligonucleotide
aaaactcctgagtgtcgaagggcacg

SEQ ID NO: 101 - DNA, 26 bp, Artificial Sequence
  Description of Artificial Sequence: Synthetic oligonucleotide
acaccgtgcccttcgacactcaggag

SEQ ID NO: 102 - DNA, 26 bp, Artificial Sequence
  Description of Artificial Sequence: Synthetic oligonucleotide
aaaactcctgagtgtcgaagggcacg

SEQ ID NO: 103 - DNA, 26 bp, Artificial Sequence
  Description of Artificial Sequence: Synthetic oligonucleotide
acaccgtgcccttcgacactcaggag

SEQ ID NO: 104 - DNA, 26 bp, Artificial Sequence
  Description of Artificial Sequence: Synthetic oligonucleotide
aaaactcctgagtgtcgaagggcacg

SEQ ID NO: 105 - DNA, 26 bp, Artificial Sequence
  Description of Artificial Sequence: Synthetic oligonucleotide
acaccgggggccccaaggcagaagag

SEQ ID NO: 106 - DNA, 26 bp, Artificial Sequence
  Description of Artificial Sequence: Synthetic oligonucleotide
aaaactcttctgccttggggcccccg

SEQ ID NO: 107 - DNA, 26 bp, Artificial Sequence
  Description of Artificial Sequence: Synthetic oligonucleotide
acaccggcagtcttccagtacctggg

SEQ ID NO: 108 - DNA, 26 bp, Artificial Sequence
  Description of Artificial Sequence: Synthetic oligonucleotide
aaaacccaggtactggaagactgccg

SEQ ID NO: 109 - DNA, 24 bp, Artificial Sequence
  Description of Artificial Sequence: Synthetic oligonucleotide
caccgagaaaataatgaatgtcaa

SEQ ID NO: 110 - DNA, 24 bp, Artificial Sequence
  Description of Artificial Sequence: Synthetic oligonucleotide
aaacttgacattcattattttctc

SEQ ID NO: 111 - DNA, 24 bp, Artificial Sequence
  Description of Artificial Sequence: Synthetic oligonucleotide
caccgagtaaggtacgtgatctgt

SEQ ID NO: 112 - DNA, 24 bp, Artificial Sequence
  Description of Artificial Sequence: Synthetic oligonucleotide
aaacacagatcacgtaccttactc

SEQ ID NO: 113 - DNA, 26 bp, Artificial Sequence
  Description of Artificial Sequence: Synthetic oligonucleotide
acaccgcaaggggatattcgggtttg

SEQ ID NO: 114 - DNA, 26 bp, Artificial Sequence
  Description of Artificial Sequence: Synthetic oligonucleotide
aaaacaaacccgaatatccccttgcg

SEQ ID NO: 115 - DNA, 26 bp, Artificial Sequence
  Description of Artificial Sequence: Synthetic oligonucleotide
acaccgtgcttttggtcctgagcgtg

SEQ ID NO: 116 - DNA, 26 bp, Artificial Sequence
  Description of Artificial Sequence: Synthetic oligonucleotide
aaaacacgctcaggaccaaaagcacg

SEQ ID NO: 117 - DNA, 26 bp, Artificial Sequence
  Description of Artificial Sequence: Synthetic oligonucleotide
acaccgtcgatcctcaagatattgag

SEQ ID NO: 118 - DNA, 26 bp, Artificial Sequence
  Description of Artificial Sequence: Synthetic oligonucleotide
aaaactcaatatcttgaggatcgacg

SEQ ID NO: 119 - DNA, 26 bp, Artificial Sequence
  Description of Artificial Sequence: Synthetic oligonucleotide
acaccggggagagaagcagaggatgg

SEQ ID NO: 120 - DNA, 26 bp, Artificial Sequence
  Description of Artificial Sequence: Synthetic oligonucleotide
aaaaccatcctctgcttctctccccg

SEQ ID NO: 121 - DNA, 26 bp, Artificial Sequence
  Description of Artificial Sequence: Synthetic oligonucleotide
acaccgtagaaaaggatgaagaaaag

SEQ ID NO: 122 - DNA, 26 bp, Artificial Sequence
  Description of Artificial Sequence: Synthetic oligonucleotide
aaaacttttcttcatccttttctacg

SEQ ID NO: 123 - DNA, 26 bp, Artificial Sequence
  Description of Artificial Sequence: Synthetic oligonucleotide
acaccggcctcagaccccacacagag

SEQ ID NO: 124 - DNA, 26 bp, Artificial Sequence
  Description of Artificial Sequence: Synthetic oligonucleotide
aaaactctgtgtggggtctgaggccg

SEQ ID NO: 125 - DNA, 22 bp, Artificial Sequence
  Description of Artificial Sequence: Synthetic primer
gccttttgctggccttttgctc

SEQ ID NO: 126 - DNA, 28 bp, Artificial Sequence
  Description of Artificial Sequence: Synthetic primer
cgggccatttaccgtaagttatgtaacg

SEQ ID NO: 127 - DNA, 20 bp, Artificial Sequence
  Description of Artificial Sequence: Synthetic primer
tctgattggctgctgaagtc

SEQ ID NO: 128 - DNA, 22 bp, Artificial Sequence
  Description of Artificial Sequence: Synthetic primer
gtagccagcaagtcatgaaatc

SEQ ID NO: 129 - DNA, 20 bp, Artificial Sequence
  Description of Artificial Sequence: Synthetic primer
gggagtattgctgaacctca

SEQ ID NO: 130 - DNA, 21 bp, Artificial Sequence
  Description of Artificial Sequence: Synthetic primer
tcttgactaccactgcgattg

SEQ ID NO: 131 - DNA, 22 bp, Artificial Sequence
  Description of Artificial Sequence: Synthetic primer
gttaggagccagtaatggagtt

SEQ ID NO: 132 - DNA, 22 bp, Artificial Sequence
  Description of Artificial Sequence: Synthetic primer
agtgtctctgtctccagtatct

SEQ ID NO: 133 - DNA, 25 bp, Artificial Sequence
  Description of Artificial Sequence: Synthetic primer
ttggtaaatagcaatcaactcagtg

SEQ ID NO: 134 - DNA, 21 bp, Artificial Sequence
  Description of Artificial Sequence: Synthetic primer
tttctgctcaagtcacactga

SEQ ID NO: 135 - DNA, 23 bp, Artificial Sequence
  Description of Artificial Sequence: Synthetic primer
caagcaatgacaacaacctgata

SEQ ID NO: 136 - DNA, 22 bp, Artificial Sequence
  Description of Artificial Sequence: Synthetic primer
ttgctttctcctgatcccatag

SEQ ID NO: 137 - DNA, 23 bp, Artificial Sequence
  Description of Artificial Sequence: Synthetic primer
cagtgctaatctagagcactacc

SEQ ID NO: 138 - DNA, 23 bp, Artificial Sequence
  Description of Artificial Sequence: Synthetic primer
cattctcctgaagagctcagaat

SEQ ID NO: 139 - DNA, 23 bp, Artificial Sequence
  Description of Artificial Sequence: Synthetic primer
tccattgggctttgtctatactt

SEQ ID NO: 140 - DNA, 24 bp, Artificial Sequence
  Description of Artificial Sequence: Synthetic primer
gacaaaggaaattagcagagaacc

SEQ ID NO: 141 - DNA, 23 bp, Artificial Sequence
  Description of Artificial Sequence: Synthetic primer
aactggtctttcccttggatatt

SEQ ID NO: 142 - DNA, 20 bp, Artificial Sequence
  Description of Artificial Sequence: Synthetic primer
ctggctgcagcatcaatatc

SEQ ID NO: 143 - DNA, 22 bp, Artificial Sequence
  Description of Artificial Sequence: Synthetic primer
gcctctattaattgcctttccc

SEQ ID NO: 144 - DNA, 19 bp, Artificial Sequence
  Description of Artificial Sequence: Synthetic primer
ccattcacttcgcatccct

SEQ ID NO: 145 - DNA, 18 bp, Artificial Sequence
  Description of Artificial Sequence: Synthetic primer
cgggaagtcgggagcata

SEQ ID NO: 146 - DNA, 18 bp, Artificial Sequence
  Description of Artificial Sequence: Synthetic primer
gaggagaagcggccaatc

SEQ ID NO: 147 - DNA, 23 bp, Artificial Sequence
  Description of Artificial Sequence: Synthetic primer
ctgctcttctcttgtcactgatt

SEQ ID NO: 148 - DNA, 17 bp, Artificial Sequence
  Description of Artificial Sequence: Synthetic primer
gcgggagccactttcac

SEQ ID NO: 149 - DNA, 20 bp, Artificial Sequence
  Description of Artificial Sequence: Synthetic primer
tctgattggctgctgaagtc

SEQ ID NO: 150 - DNA, 20 bp, Artificial Sequence
  Description of Artificial Sequence: Synthetic primer
cgagagcaggtagagctagt

SEQ ID NO: 151 - DNA, 20 bp, Artificial Sequence
  Description of Artificial Sequence: Synthetic primer
ggagtgccgcaataccttta

SEQ ID NO: 152 - DNA, 21 bp, Artificial Sequence
  Description of Artificial Sequence: Synthetic primer
cctggactcatttcccatctc

SEQ ID NO: 153 - DNA, 20 bp, Artificial Sequence
  Description of Artificial Sequence: Synthetic primer
gggtggagatgggaaatgag

SEQ ID NO: 154 - DNA, 22 bp, Artificial Sequence
  Description of Artificial Sequence: Synthetic primer
gctacaccaccaaagtatagca

SEQ ID NO: 155 - DNA, 23 bp, Artificial Sequence
  Description of Artificial Sequence: Synthetic primer
tggtggtggaacttatctgattt

SEQ ID NO: 156 - DNA, 21 bp, Artificial Sequence
  Description of Artificial Sequence: Synthetic primer
agggggtacacattctcctga

SEQ ID NO: 157 - DNA, 20 bp, Artificial Sequence
  Description of Artificial Sequence: Synthetic primer
gacctctgggttccattggg

SEQ ID NO: 158 - DNA, 20 bp, Artificial Sequence
  Description of Artificial Sequence: Synthetic primer
caaagcccaatggaacccag

SEQ ID NO: 159 - DNA, 20 bp, Artificial Sequence
  Description of Artificial Sequence: Synthetic primer
gaaggggctttcccaacagt

SEQ ID NO: 160 - DNA, 20 bp, Artificial Sequence
  Description of Artificial Sequence: Synthetic primer
gcccaagacagggaaaacga

SEQ ID NO: 161 - DNA, 20 bp, Artificial Sequence
  Description of Artificial Sequence: Synthetic primer
tgacaactctggtcgctctg

SEQ ID NO: 162 - DNA, 20 bp, Artificial Sequence
  Description of Artificial Sequence: Synthetic primer
cagagagcctcggctaggta

SEQ ID NO: 163 - DNA, 20 bp, Artificial Sequence
  Description of Artificial Sequence: Synthetic primer
aatggctccgtccgtattcc

SEQ ID NO: 164 - DNA, 20 bp, Artificial Sequence
  Description of Artificial Sequence: Synthetic primer
gggaagtcgggagcatatcg

SEQ ID NO: 165 - DNA, 20 bp, Artificial Sequence
  Description of Artificial Sequence: Synthetic primer
cactcccgaggctgtaactg

SEQ ID NO: 166 - DNA, 20 bp, Artificial Sequence
  Description of Artificial Sequence: Synthetic primer
atggcgtgttttggttggag

SEQ ID NO: 167 - DNA, 20 bp, Artificial Sequence
  Description of Artificial Sequence: Synthetic primer
ggagccactttcactgaccc

SEQ ID NO: 168 - DNA, 20 bp, Artificial Sequence
  Description of Artificial Sequence: Synthetic primer
gggagggtcagtgaaagtgg

SEQ ID NO: 169 - DNA, 19 bp, Artificial Sequence
  Description of Artificial Sequence: Synthetic primer
gagggccgtaccaaagacc

SEQ ID NO: 170 - DNA, 20 bp, Artificial Sequence
  Description of Artificial Sequence: Synthetic primer
ggtcccaaatgagcgaaacc

SEQ ID NO: 171 - DNA, 20 bp, Artificial Sequence
  Description of Artificial Sequence: Synthetic primer
gggtccgagagcaggtagag

SEQ ID NO: 172 - DNA, 20 bp, Artificial Sequence
  Description of Artificial Sequence: Synthetic primer
ccgcctgaaggacgagacta

SEQ ID NO: 173 - DNA, 20 bp, Artificial Sequence
  Description of Artificial Sequence: Synthetic primer
cagggcggtccttaggaaaa

SEQ ID NO: 174 - DNA, 20 bp, Artificial Sequence
  Description of Artificial Sequence: Synthetic primer
gggagtgccgcaataccttt

SEQ ID NO: 175 - DNA, 20 bp, Artificial Sequence
  Description of Artificial Sequence: Synthetic primer
gaaattgggctcgtcctcgt

SEQ ID NO: 176 - DNA, 20 bp, Artificial Sequence
  Description of Artificial Sequence: Synthetic primer
cgaggacgagcccaatttct

SEQ ID NO: 177 - DNA, 20 bp, Artificial Sequence
  Description of Artificial Sequence: Synthetic primer
agtgagggggcctaaggttt

SEQ ID NO: 178 - DNA, 20 bp, Artificial Sequence
  Description of Artificial Sequence: Synthetic primer
actaccactgcgattggacc

SEQ ID NO: 179 - DNA, 21 bp, Artificial Sequence
  Description of Artificial Sequence: Synthetic primer
aggagccagtaatggagttgt

SEQ ID NO: 180 - DNA, 22 bp, Artificial Sequence
  Description of Artificial Sequence: Synthetic primer
cacaactccattactggctcct

SEQ ID NO: 181 - DNA, 20 bp, Artificial Sequence
  Description of Artificial Sequence: Synthetic primer
ggagggtagcattccagagg

SEQ ID NO: 182 - DNA, 19 bp, Artificial Sequence
  Description of Artificial Sequence: Synthetic primer
ccattcacttcgcatccct

SEQ ID NO: 183 - DNA, 22 bp, Artificial Sequence
  Description of Artificial Sequence: Synthetic primer
ttgcagatgattgcttcctttc

SEQ ID NO: 184 - DNA, 21 bp, Artificial Sequence
  Description of Artificial Sequence: Synthetic primer
agggggtacacattctcctga

SEQ ID NO: 185 - DNA, 20 bp, Artificial Sequence
  Description of Artificial Sequence: Synthetic primer
gacctctgggttccattggg

SEQ ID NO: 186 - DNA, 20 bp, Artificial Sequence
  Description of Artificial Sequence: Synthetic primer
gaaggggctttcccaacagt

SEQ ID NO: 187 - DNA, 20 bp, Artificial Sequence
  Description of Artificial Sequence: Synthetic primer
gtggcgtatgccccagtatc

SEQ ID NO: 188 - DNA, 4524 bp, Artificial Sequence
  Description of Artificial Sequence: Synthetic polynucleotide
aagaaatttttcccaaatagggggtacacattctcctgaagagctcagaatactcaactcagctggatcctactcaaagtattgctaaataacatctgcccaacaataaaaaaaatgtaaatatgaccttggtcacaaatatgtcatttaaatgcaacttgtttaataaaatgacaaaggaaattagcagagaacctggggattctttcagtactatgagcatggggaaaactagaaaaatgaactaagtatagacaaagcccaatggaacccagaggtctgggcaaaaaatgacttggtggtgaacacattgcacaagtaacatgagaaagcagaaaatgcaggtcatacacgcacccctgacccagaccagcagagctggctgcagcatcaatatccaagggaaagaccagttattctcaagaagtgagacaagcaaagagctctatagaataaattagcatagaaggggctttcccaacagttaaactttccctgtcacgcgattcacctacttaaaaaccagggctttttctcaccaccattcacttcgcatccctggcttccacgcagagggaaaggcaattaatagaggctacatttttctgcctttaaagatattctcaaatgatctctctccacgcccaagacagggaaaacgacacaatctggctcaactccaagctagaaccctacaaattcagtggggccatttcagagatactggggcatacgccactgagagcccaagaatgtgaggtgggggtggcgaagcccaacgtctttagtgtgggaaaggaagcaatcatctgcaatagggaccctaggacgagaggaaaagcgtccaggaacattcttggaggggggagatcgagggccccagagcgaccagagttgtcacaaggccgcgcgaacgggggtgggggtggggtttggggaggggaaaaaaaagtgtgctgtgtattttgaggagggcggcgagaggcctattctcaagtaaaaggtaaacgtggagtaggcagttcacaggaaaaggggtgaagaggcgtggggggaggggaaacgtcctgacccaggaaagacatgaaaagggtagtggggtcgactagattaaggagggggcctctccgcctgggaaagaggggtacagtggtgtgggggggcgaggggggatgggaaggggcagcatcctcctgctgagagccgggggagggccaggcccacgtcccgagagcaagcgcgaggagacggaggaggtgacccttccctcccccggggcccggtggtgaggggaggtctctcttttctgtcgcacccttaccttgtcccaggcctgggcccgggctgcggcgcacggcactcccggtaggcagcaggactcgagttaggcccagcgcggcgccacggcgtttcctggccgggaatggcccgtgcccgtgaggtgggggtggggggcaaaaaggcggagcgagccaaaggcggtgaggggggagggccagggaaggaggggggggccggcactactgtgttggcggactggcgggactggggctgcgtgagtctctgagcgcaggcgggcggcggccgcccctcccccggcggcggcggcggcggcggcggcggcggcagcagctcactcagcccgctgcccgagcggaaacgccactgaccgcacggggattcccagcgccggcgccaggggcacccgggacacgccccctcccgccgcgccattggcccctccgcccaccgtctcgcacccattggccagctccccgccaatcagcggaagccgccggggccgcctagagaagaggctgtgctctggggctccggctcctcagagagcctcggctaggtaggggagcgggactctggtttgggggagggccggcggtttggcgggggatgggtgcttgaggtggtctgaccggtagcgggggtcgccttccctagcgggaagtcgggagcatatcgtttgttacgctggaaggggaagaggtggtgagaggcaggcgggagtgcggcccgccctgcggcaaccggagggggagggagaagggagcggaaaagcctggaatacggacggagccattgctcccgcagagggaggagcgcttcctgctcttctcttgtcactgattggccgcttctcctcccgccgtgtgtgaaaacacaaatggcgtgttttggttggagtaaagctcctgtcagttacagcctcgggagtgcgcagcctcccaggaactctcgcattgccccctgggtgggtaggtaggtggggtggagagagctgcacaagagggcgctgtcggcctcctgcggggggaggggagggtcagtgaaagtggctcccgcgcgggcgtcctgccaccctcccctccgggggagtcggtttacccgccgcctgctcggctttggtatctgattggctgctgaagtcctgggaacggccccttgttattggcttgggtcccaaatgagcgaaaccactacgcgagtcggcagggaggcggtctttggtacggccctccccgaggccagcgccgcagtgtctggcccctcgcccctgcgcaacgtggcaggaagcgcgcgcaggaggcgggggcgggctgccgggccgaggcttctgggtggtggtgactgcggctccgccctgggcgtccgccgcctgaaggacgagactagctctacctgctctcggacccgtgggggtggggggtggaggaagtgagtggggggtcggtcctgctggcttgtgggtgggaggcgcatgttctccaaaaacccgcgcgagctgcaatcctgagggagctgcagtggaggaggcggagagaaggcgcacccttctccgcagggggaggggagtgccgcaatacctttatgggagttctctgctgcctccttttcctaaggaccgccctgggcctagaaaaatccctccctcccccgcgatctcgtcatcgcctccatgtcagtttgctccttctcgattatgggcgggattcttttgccctggcttaacctgattcttgggcgttgtcctgcaggggattgagcaggtgtacgaggacgagcccaatttctctatattcccacagtcttgagtttgtgtcacaaaataattatagtggggtggagatgggaaatgagtccaggcaacacctaagcctgattttatgcattgagactgcgtgttattactaaagatctttgtgtcgcaatttcctgatgaagggagataggttaaaaagcacggatctactgagttttacagtcatcccatttgtagacttttgctacaccaccaaagtatagcatctgagattaaatattaatctccaaaccttaggccccctcacttgcatccttacggtcagataactctcactcatactttaagcccattttgtttgttgtacttgctcatccagtcccagacatagcattggctttctcctcacctgttttaggtagccagcaagtcatgaaatcagataagttccaccaccaattaacactacccatcttgagcataggcccaacagtgcatttattcctcatttactgatgttcgtgaatatttaccttgattttcatttttttctttttcttaagctgggattttactcctgaccctattcacagtcagatgatcttgactaccactgcgattggacctgaggttcagcaatactcccctttatgtcttttgaatacttttcaataaatctgtttgtattttcattagttagtaactgagctcagttgccgtaatgctaatagcttccaaactagtgtctctgtctccagtatctgataaatcttaggtgttgctgggacagttgtcctaaaattaagataaagcatgaaaataactgacacaactccattactggctcctaactacttaaacaatgcattctatcttcacaaatgtgaaaaaggagttccctcagtggactaaccttatcttttctcaacacctttttctttgcacaattttccacacatgcctacaaaaagtacttttctgctcaagtcacactgagttgattgctatttaccaaaatcaaagtaacattatcagatctctgtagggtggttccctctggaatgctaccctccatagtccttacccttcaagtaaagagcatgaagactgaaatatctcctctgtgatctgtcatcctttaagccagaatcccccataaaaaagttagtattgctttctcctgatcccatagcaggttgaatcatagcacttatcaggttgttgtcattgcttgcttaaattctcctaactatttggagcttcttgagggcacaggttcttgttgagtcttgtacctaagcacctagtatagtccttgatgtctagccaaccctaaataaaatgcagtgagtgacatgtagatgtctttataaggtttgataggttggtctctcaaatagttcttttgtatgtttggtagtgctctagattagcactggccagtataactctgatgatggaaatgttct

SEQ ID NO: 189 - DNA, 26 bp, Artificial Sequence
  Description of Artificial Sequence: Synthetic oligonucleotide
acaccgccggggccgcctagagaagg

SEQ ID NO: 190 - DNA, 26 bp, Artificial Sequence
  Description of Artificial Sequence: Synthetic oligonucleotide
aaaaccttctctaggcggccccggcg

SEQ ID NO: 191 - DNA, 4144 bp, Homo sapiens
agtgtggtactttgtcttgaggagatgtcctggactcacacggaaacttagggctacggaatgaaggtaaatttaaaataaaacaagcgggagtcacagatacactgtctgggaaagtgaaacttaagagctttgtgagtcgtgttgtaatgcttttagatgcatttatataccaacaggccaaagtcacattttttaccgattagattcctgatcattcaggggttaccaaggttatgctacccactatagttaataaacaaaaagcaaactggtctctattctatctcatgcactcaggcacaacttttccagatttaagggggaaaaaaaaccctgtctttacacctacaatcccagggcgagctcactctctggcaacaagctccctggggtgatttttcttctagaagagtacaggaggacaggcaaggagtgggaggcagggagtccagttcagggacagggattccgggatgaaaagtgaagggagagggccagggaccttgccgagggtttctccctggtttctcagacagctcctgggccaagactcagggagacactgagacagaacgcttggcacaagagtagcggggtcagggcgaagtcccagggcctcaagcgtggctctcagggtctcaggccccacaggcggtgtatgggttggggaggccccgcgttggggattctctcctccttctcctaacctgtgtcgggtccttcttcctggatactcaccgggcggccccagttctcactcccattaggtgacaggtttttagagaagccaatcagcgtcgccgcggtcctggttctaaagtcctcgctcacccacccggactcattctccccagacgccaaggatggtggtcatggcgccccgaaccctcttcctgctgctctcgggggccctgaccctgaccgagacctgggcgggtgagtgcggggtcaggagggaaacagcccctgcgcggaggagggaggggccggcccggcgggggcgcaggactcggcagccgcgccgggaggagggtcgggcgggtctcaacccctcctcgcccccaggctcccactccatgaggtatttcagcgccgccgtgtcccggcccggccgcggggagccccgcttcatcgccatgggctacgtggacgacacgcagttcgtgcggttcgacagcgactcggcgtgtccgaggatggagccgcgggcgccgtgggtggagcaggaggggccggagtattgggaagaggagacacggaacaccaaggcccacgcacagactgacagaatgaacctgcagaccctgcgcggctactacaaccagagcgaggccagtgagtaactccggcccagggagcagatcacgacccccacctccatgccccacggacggcccgggtactcccgagtctccgggtctgggatccaccccgaggccgcgggacccgcccagaccctctacctgggagaaccccaaggcgcctttaccaaaatccccgcgggtgggtccgggcgagggcgaggctcggtgggcggggctgaccgagggggtggggccaggttctcacaccctccagtggatgattggctgcgacctggggtccgacggacgcctcctccgcgggtatgaacagtatgcctacgatggcaaggattacctcgccctgaacgaggacctgcgctcctggaccgcagcggacactgcggctcagatctccaagcgcaagtgtgaggcggccaatgtggctgaacaaaggagagcctacctggagggcacgtgcgtggagtggctccacagatacctggagaacgggaaggagatgctgcagcgcgcgggtaccaggggcagtggggcgcctccctgatctcctgtagacctctcagcctggcctagcacaaggagaggaggaaaatgggaccaacactagaatatcgccctccctctggtcctgagggagaggaatcctcctgggtttccagatcctgtaccagagagtgattctgagggtccgtcctgctctctgggacaattaagggatgaagtctctgagggagtggaggggaagacaatccctggaagactgatcaggggttccctttgaccccacagcagccttggcaccaggacttttcccctcaggccttgttctctgcctcacactcaatgtgtgtgggggtctgactccagctcctctgagtcccttggcctccactcaggtcagaaccggaggtccctgctcccccgctcagagactagaactttccaaggaataggagattatcccaggtgcccgtgtccaggctggtgtctgggttctgtgctcccttccccaccccaggtatctggttcattcttaggatggtcacatccaggtgctgctggagtgtcccatgagagatgcaaagtgcttgaattttctgactcttcctttcagacccccccaagacacacgtgacccaccaccctgtctttgactatgaggccaccctgaggtgctgggccctgggcttctaccctgcggagatcatactgacctggcagcgggatggggaggaccagacccaggacgtggagctcgtggagaccaggcctgcaggggatggaaccttccagaagtgggcagctgtggtggtgccttctggagaggagcagagatacacgtgccatgtgcagcatgaggggctgccggagcccctcatgctgagatggagtaaggagggagatggaggcatcatgtctgttagggaaagcaggagcctctctgaagacctttaacagggtcggtggtgagggctgggggtcagagaccctcaccttcacctcctttcccagagcagtcttccctgcccaccatccccatcatgggtatcgttgctggcctggttgtccttgcagctgtagtcactggagctgcggtcgctgctgtgctgtggagaaagaagagctcaggtaaggaaggggtgacaagtggggtctgagttttcttgtcccactgggggtttcaagccccaggtagaagtgtgccctgcctggttactgggaagcaccatccacactcatgggcctacccagcctgggccctgtgtgccagcaccttctcttttgtaaagcacctgtgacaatgaaggacagatttattaccttgatgattgtagtgatggggacctgatcccagtaatcacaggtcaggagaaggtccctggctaaggacagaccttaggagggcagttggtcgaggacccacatctgctttccttgtttttcctgatcccgccctgggtctgcagtcacacatttctggaaacttctcgagggtccaagactaggaggttcctctaggacctcatggccctgccacctttctggcctctcacaggacattttcttcccacagattgaaaaggagggagctactctcaggctgcaagtaagtatgaaggaggctgatccctgagatccttgggatcttgtgtttgggagcccatgggggagctcacccaccccacaattcctcctctggccacatctcctgtggtctctgaccaggtgctgtttttgttctactctaggcagtgacagtgcccagggctctaatgtgtctctcacggcttgtaaatgtgacaccccggggggcctgatgtgtgtgggttgttgaggggaacaggggacatagctgtgctatgaggtttctttgacttcaatgtattgagcatgtgatgggctgtttaaagtgtcacccctcactgtgactgatatgaatttgttcatgaatatttttctgtagtgtgaaacagctgccctgtgtgggactgagtggcaagtccctttgtgacttcaagaaccctgactcctctttgtgcagagaccagcccacccctgtgcccaccatgaccctcttcctcatgctgaactgcattccttccccaatcacctttcctgttccagaaaaggggctgggatgtctccgtctctgtctcaaatttgtggtccactgagctataacttacttctgtattaaaattagaatctgagtataaatttactttttcaaattatttccaagagagattgatgggttaattaaaggagaagattcctgaaatttgagagacaaaataaatggaagacatgagaacttt

SEQ ID NO: 192 - DNA, 78363 bp, Sus scrofa
  modified_base (240)..(339): a, c, t, g, unknown or other
  modified_base (426)..(426): a, c, t, g, unknown or other
  modified_base (594)..(594): a, c, t, g, unknown or other
  modified_base (16598)..(16697): a, c, t, g, unknown or other
  modified_base (67665)..(67764): a, c, t, g, unknown or other
attcctttcttatttccttttgtgtatatcctatagctattttctttggagttgtcatggggattacatttaacatcctaaaattataaaacttaaattagaatttataccagtttaacttcaataaaacaccaaaactctgttcctttacagctgtctccccatctcttgtagttgttgatatcacaaaattgcatctttgtacattgtgtgccccaagacataaactaataattcttnnnnnnnnnnnnnnnnnnnnnnnnnnnnnnnnnnnnnnnnnnnnnnnnnnnnnnnnnnnnnnnnnnnnnnnnnnnnnnnnnnnnnnnnnnnnnnnnnnnnttttttaattattagcaacaaattggagtacaagtataatgatctggctttagaaaggaatttattaaatggttgtttgtttattantaatttggtcttttgtcttaggggctgcactcacggcatatggagttctcaaggctaggatccaatcggaactgtagccaccagcctacaccagaggcacagcaacacaggatccaagccacatctgtgacctacaccacagctcatggcaatgctggatccttaacncactgagcgaggccagggatcaaacctgcatcctcatggttcctagttggatttgtttttgctgcacttataggaactcccatatttaaatttttaattttatttttaaaaaattatttttattaaagtatagttgatttacagtgctgtgaaaatttctgctgtacagcaaagtgattcatatatatgagacattcatatatatatatacacatatatacatatacattcatatatatacattctcatatatatatatatacacacattcatttttctttaaaatatggaacccttcataaatttgtatgtcatccttcacagaggccatactaatcttttaaatattgttcccattttagtgtatgtgctgctgaagtgagcactaaaaaatacattagtctctttaacagtgtagaaaacaaaaagtagagttacaaaccattattacaataggagcttttataatcactcatatgtatacttttattgagatcttcaagtaaccagcttttcatttcaccctgaaaaactcccttacgacttccaaaatttctaacaagaaatatgccagtaatcttattgaggatctggtgtatgtgatgagtcacttctgtcttgctgttttcaagattttccctttgtccttatacttgtcttccaaaacttcgattatgatgtgtcttggtgtgggtctctttgagttcactttacctggagttcattgagcttcttggatatttatagtcatgtctttcatcaaacttgaagagttttcaggtgttatttcttcaaatattttctctctcctctctttctgggactcctccaatgcatatattactcagcctgttggtgtcccataggtctctaagactctgttcacttttctttaattttttttctttctggtccttggacttgataattgccattgtcttatcttcaagtttatgggttctttcttctacctcctcaaatctgcctttgaatcactctagaagagttttcattccagttattgtaattttaagctcatgaatttctttttggtttatttttaggtattctctctctttgctgacatttccattttgttcatacataatttgtttttacttttcccacatcttcctttagttctttgagcaactttgacagttatttttagtctttttcttatatatcttccaccaggtcttttttaagagtagttgcctttatttttcctttgaataggccaacttttctgtttctttgtatgccttgtgattttattgttgttgttgaaaactggatatttaatttaacttttatttggccagtcccatggcatgcagaaattccacagccagggacagaacctgtgccaccacagcaacccaagccactgcagggacaacaccagatctttaacacattaggccaccagggaactctaaaaactggatattttaatctaatattgttgtaactctagaaagcagattaccctccttcccctgtggtttattgtctttttttgttattgttgttattgttttcacttattatttttgcttttttcattgttgttggctgtctctgtgccaagaatcaatctaacttgtaaacttaaggtcttttgaagttgtttctgagcctttccctgggtatgcatggtcacttagtaattttccccttatatgtattgtttttaaatgtcctagtctttattttatttatttatttatttatttatttttgtctttttgccttttctagggttgctcccacagcatatgtaggttcccaggctaggggtctaattggagctgtagctgctggcctacaccacagccacagcaatgtgggatccgagccgcatctgcaacctacaccacagctcatggcaatgccggatcctttaatccactgagaaaggccagggaccaaacctgcaacctcatgtttcctagtcggattcgttaaccactgcgccactgcaggaactccgatgtcctagtcttttattttattttatttgtgtctttttgctatttctttgggccgctcctgcagcatatggaggttcccaggccaggggttgaatcaaagctgtagccactggcctacgccagagccacagcaacgcgggatctgagccgcatctgcaacctacaccacagctcatggcaacgccggatcgttaacccactgagcaagggcagggactgaacccgcaacctcatgattcctagtcggattcgttaaccactgctccacgacgggaactcccatgtcctagtctttaatatctggtctcaaaaggggaaaaagtagaatgaagggagtgataataggtgttaatcctttaagtcctatggaagtcacttcaactggaggaggaggggcttgcaataatgggggaaggtgcaacagcaatggatggctgcctctttgtctgcacctctgtgataagaagctgaaatgagcagtcagagtatagatacacactatttggaggacagggtcattttttcccaccctggattccacaaactatgtgtaagtcattcccgggacacatgcataactgtctgccaaataactgaaaggggggagaggggtgactggtactgtgttaagagctgaagtggattgcaattagccttaatttaccattcaagcttcctcctggaaatttcaagccttcagtagaccccaaagttccaaaatacttacatcagataattctgccagtgcaattattgtctaggtaaaaagacagattcctggtacttcctactcccaccatattaccagaatcctcttctcctggaaatcccttaaaagtcccaatacccactcataccaattgaatcagaatctctgggggaagttctcattgtggctcagtgggttaagaacccaacagagtatctgaggttgtgggtttggccagtgatgctgtggctgtggcataggctccagctgctgctcacactcgacccctggcccaggaacttccatgtgctaaaggtgcagctgtaaaaagaaaaataaagaatctctggggttgaaaccaggcatcagtattagttctccaggtaatttcaggatgcagccaagcttgagaaccagtacgttatgtctcctacaactagagagaggtataactcctatgtgatatttggattttggaggcagtgctctacatatgagggtatccaactacctcccacttatctgataagcataaaagtggtgagattccagtagaaccctgaacaagaggaagctctccagctggtccaagttgtgggcaagttgccctgccacttgactcttctgaccaatcatatcttacatagttaaaaaggtctgaagtagactgggacgatggatgaagactgttgctagctttggtagaaaacaatagcagaggccaagagagttctggagtaaggaaatgcccattgatcaggtgactataattccttccttttaaagaggaatttctgtaacttttctcttttttccttctcactcactactgactcttgtgtatatgggtgtgaactaaatttatcatttatttcacagattgaaaaatagtcaaatgggctttctaaggaacccaaggagaaatagttattatctgaagatagcagaccctgagaagcctgaccctctgacattatctctggattctggagtctggtattagcagagggggctgagctagagagttgtgcatgatattttgcatcatggtagcatagactattttagatatgtggaaaaaattgattgacagccagacagttgtaagtgaatgtagtaaagacttagaggcaactacccagctcataacagtatgtccttctctgagaactccccatagtctaatcctaataaactatcttttattttaccccatgtcatagctgctgggaggatgagtggatgctgtgccatttgaattttcttttttcaagaatctagagttttgaatctggagatatttgaagctgggtcacatttgcagacctttagggaaagtttgcattttttagtctttgaagcccttgaacttcccttgctcttgcttgtggcctggtggtagtgatatgctgataaatctttataaaaccacctcttttttttttttttttggtctttttagggtcacacctgcagcatttagaatttcccaggctaggggttgaatcaaaattgtagccactggcctatgccacagccatggcaatgccagatccaagctgcttctgcaacctacactgcagcttgcaacaatgagggatccttaacccactgagtgaggccagggattaaactcacatcctcatgaatactagttgggttcttcacaacgagccacaacaagaactccacagccacctccttaaaaagaaggatagaagggaaagggaaggaaaggggggcctgatttctagtgttttcagattcccatggtgtaaatactcttgctgtggttgatatcaagctattatagagaagtcactgaacaaagagttggcaagcattttgtataacaagttctcacaagcgggtacgaagccagcttcagaatactcctggctgactgtcaactctcccttgtattcagtagaactctctcgtagcctcccagtaatccctcttgtgggtttagacagctcaagaggaatgtctgttctaagcaaccaaaatatcttcaaccaaaatacctagctattataactatcttttattctgaatagttgcaatcaatttactaaaaatgtgttccaactttggctggtttttcacacagccacatatattaaatatttacagctatattcatttacatgcaagattcctatctatttctacaaatgtgcagtttttgccaggtccaggaaagagtgtttttaatcatagcagtcccttgagatgtgttagctttggaaattcctgccctctagtgtccagtgtgaggaactactttagtcttagctatgaatgttacaagaggattaagaagaggtgagttcaaagtctttgacacccatcagggacaattctctggctatagacaggtgggtattatgcaaaggaattttgcaccaggttctcaaactcatcatgattgacattttaagccagacaattcttggttgtgagggctgtcctgtacgttgtaggatgtttaacagcatccctggcctctatccactatatgtgagtggcaacctctccacaagttgtgacaaccaacaatatcttaaggcactgccaaatgtccctggggacagcacagggcatgggcatgcagtggtggtgatggtgcaaaaatcatcctgggtgagaaccacctctctactctaatggaataaatttgtcccatgcatcactgaccttaagtagcactgaacccagtaggctatagtaccaggttagagcctgatgttcagactgagactcttgaattcccacactgtgtactataggagaaataattccaggtgccagagagagaggcatccgctttgtaataggacagagtccacaatcaaaacttttttttttttttcccagatttcccgttgtggctcagtggtaatgaatctgactagcatccatgaggacacaggtttgatccctggcctcactcagtgggttaaggatccggtgttgctgtgagctgtggtataggttgcagatgcagctcagatctggcgttgctgtggctgtggtgtaggccggcagctacagctctgattcgaccgctagcctgggaatttccatatgccctaaaaagaccaaaaaaaaattgttttttcgttaaagagagcacttatgaggcattccaggagtggatgtgatgattcattcattcatccatcttatagataatttgttaagcagcatctctgagacaagtgacataatgggtgctagaacttatgcaaaggcagactaggttctgcctttaaggaactaaccattttagagggttcaatggggatgttttcagttataagagaaactctgattccaagtgacctgataatagaactttattggctcacacatttgaaaagcccacaggcagtgcaggcttatttttgcagccatggctcagggttgtcataaggactgcagttccttcagtgtccctgttcctcccaccctattgtcagttttgtcctaaggatggccttccctgtggtcaccagaggtataagcaacttctaatattacatgcttctttatttccagcaaaagacttgagattcactttgtttggactagtttaggtcacctgcccacccccaaatcaatcattgccaccaggggctggggaagtgttgactggcttagtctgggtcacttggtccaaccatggcaccagtttcaataggaatcacactgactccataaaggagacaaggcattgctgggaagagagaaggacagccacagatgctgggcattttaaatgcatagccctcaaacagccaaagccttctcctgatttttgttgcttctcatacaagctctgctatgagatttcatccaggcgcatggctttggcaccatttatgtgggtctccatgaaagtcttatcacagtcctctgtgctttgcatctgctgctccaccctctgaaacctcatgccatctccactcctaacagtgatccccttctcttctctcaaagctcaattcacctctgaagacatccttccctcctctgtacacccttggcccttgaacttccttgggcctcgtattgttcaggtttcaatggactgcttctctagtgggctctaggatgagtttagccccaccttctgcttctcaacaattttggtctacaaagttctctctctttaatgcctaatataagaattgtgggcttttggtggtgatgccttgctgtcctcagatttcaaaagcaagatggttaagtgtgtgtgtgtgtgtgtgtgtgtgtgtggtgcacgcacatatgtgaaagatagagtaagggaatcagacaggagctgtgggaaaagcaaagaatttagaatcagacagtcttgggtttgaatcctgctctgcacctttatagatgtgaggctttgaccaatggatcctcacttaactctgctttctgtccttaaaaagtatgcattgtatgttaaatattcacactttcacacttgagagcatgctaccatgcctgtgttattctttacataaggtacatttaataaatacttgtaaccgtaagtgttgctgaagctatggttcccttatcagtaaaacacatgatgactttggctgagagagataaaaaatgggcaaaagtcagctcttctagccttaaagacacttctcctcctccagctcatgggccccccagagtataaggaggaggtgtgccttgtcccttctacccacccccttgtccgaatgccctctgaggcactgccttggcataacagcttatgtgtgcccatgtggctcagagcagccttatgggcacaatgtcaaattgagaataatcagtcatgtatttatttttacaggatccattttaactaatttaatgcagttggggcagatttagtgcataaaaagtgggagatgatgcaggcttaggaacatgtctaatttttaaaatattcttttttttttgccatttctagggctgctcctgcagcatatggagattcccaggctaggggtctaattggagctgtagccaccggcctatgccacagccacagcaacgcgggatccgagccgcgtctgcaacctacatcacagctcatggcaacgccagatccttaacccactgagcaaggccagggattgaacccgcaaccttatagttcctagtcggattcgttaaccactgtgccacatgggaactcctaaaatattaattcttatggcaaaaattcccctttattagattcttctatgaagcagcattctccttgataggaaacctggctgtccatatgtatggtgtcaacacatttatcctcatctgcttctctggtgtgagcttccctcagatgcttcccaggtgagtggcttaacctttctgggcctcactttgctcatctacagaatgggaataatcctctactatgagggaagcatgccctgttgtctatcccatgcaccacacatcagcctgctctgcttcaaactatttattacaaatacacccgccctgtctcgctggaaatccagcaagtctctcccaggtttcccttggccatatacattccccagagttcaggactagtaaccaacagatttggctatggcattgttttctccctctgcccttgtgccccaccctgaccttcaagccttattctactagttcttccactggcagttagttacttcagtgcatcactttgggaagctctacataaacatttgttgtgataaaagtgagtgaatctcagagttcctgtcctggtgcaaagggattagtggaaactctgcagtgccaggaagcaggtttgatctcctgcctggtgtaaattgggttaaaggatgtggcattgctgcagctgcagtggaagtttcaacttcgacttagatctgatccatactgcagcttggatctgatatctggcctgggaactccatatgctgcggggcagctgggaaaggggaaaaaaagttagtgaatctcaatcatgttctttctttcttttcttcttcttcttcttttttttttttttttttttttttttttgtcttttcatcttttctagggctgcacccttggcatatggaggttcccaggctaggggtcgaatcgaagctgtagctgcaggcctacgccagagccacagcaatgtgggatccgagccacgtctgcgacctacaccacagctcacggcaacgccagatcgttaacccactgagcaaggccaaggattgaacccgaaacctcatggttcctagtcagattcgttaaccactgcgccacgacgggaagtccaatcatgttctttctatctttgtgccagcagacacatttttaggacatgagaactttgatggggggtggggggtggagtctaggtatttaaaaattctgtaaatgacagttctgaacatctttgggagaaaagccacaatccatgaccagaccagaatatactgagaaaataatttatttaattttaaatcaggaatttttattttttaatattgaactattaataagatcttgaatttgtccatttgaaatttaaatttaaatgatttttttttaaaaaatcaagattccttcaaaaggaaatatcagtccttttctttaatctttgagaacgaatcatttctgtagtttggaacttgcaccatgaagtctctgcactccagaatggattccataaacttgcgttatagagaaacaagagtcctaattgacttgtgatttcctttttcttttacaagactacttctccaggatttttgttgagttattttgttgggttattttgttgagttattttgctgggttgcaaaaatttttagcaagaattgaagagtaggaggcccagggaaacagtagagaaaatgtaggtttcattttatcaaagaagcccatcgtgctgaacatcaagtcagtgcaatggctcttcaagtaaatcatttgaaaatggacacaaatgacctaaactggaacacaagcaaaagtatatcacatacctgcagatgtaaatattgcctcctaacttcctttacaccaaactgcttaactttaaattacatgtaagatctcatagcttttcttagagaaagggattgaaaagctgtttagtcatgaggactgggtctcccattgccatcctctctactttgatataaaatcaattaaccactttattaaacatgtccggcagttacacttcagtagtgcagctggggcaggggaaatgagaggttccctgataagcaggcttttcctctagtccactccttgacggtggctctcaagttgcccatgatgggctgagggactctgagagttagagcaggtggcagcaggacttgctgatgcctgattgtcatgaagccaagatctaggaagtcacttcaacccactgtaggcctctgtccactctgacatcatccacttcctctgagcaaggatttgtagacacaaattccagagtctggcagactgaatatgacttggccaaagcaagaagcatcttctaagacagtgctgctctagttgtcatatggttgaggaggctggagccactctcattgcctcccattcagtgcctggatccaagctgtatgtacatgccaactccatgccctgtgtctcttagaaatggcattgccccacagtgatcagccccctctctttccaatctgtcttcgctatttcatggcaaacttacttagaagctgtgcttttatttcgtgctgagctcccattggttcattcggattccctgtaactcccaacattcaccattgggaatcttgatcagtatctgcgcagaagccaaacaaaaccctgatgcgaaaaggacatggacttcaaataacctgaagtcctctgctgttgaaatcatctgaggattgctaaggtagactctgatctcctgctgcaaagcaactctgttgctttagacttagcagagacaggaagacgctaaaatcaagaggacgacccctcccaatcttattttgttgccaaacacttccctttgcatacttttctccagtatgacatgtagagtgtctctgactttttctttgcctatgacaatttttttttttggttcagttaatagtatataccccctcaacccagaacagataagaaatcattgggaatttacatctgattactacagagtcattctcccatttgacaaggctcaaagttgcaaggaagaataatatgtacttactgtgttggtattttgttagtatttttttaaaagttaaaattaagtgctacttctctgaggaagtagccagagtaatactctttcaaattcagaaaactgctggcacaatttaaagtcagatgttatttctaaccaaattatactcttttttctgccaagctatcttgacaatcctaatatccacagacatgcctatatgataatcccagcagtattctggggataagattttagtgggtttgttgagaaggaaatacttgtttagatggctttcatcatgccactcggcttctatgtcattttccttgtcctggaggattcccttgaagcactcctgagtgatgtttagaacctgagtgggtgttcccccaaaaatggctgcgtggtaataaaaatccccctggccaaacggaatgtaggctgcggactccttccgcctctcgtaggtgaactcgtcaggatgtgccttgtaccaccaggcctgtagctgagccaccgactggcccagggtctccaccccaaagttgttttggaagacctgatccacgtccatgcagaagaggaagtccacctcgtgctggatgtgggccaggatgtgctccccgatggtcttcatgcgcatcatgctgatgtcttgccacctcttctcggacttgatctcaaacactttaaaggaacgcagaggacccagctctatcaaaggcatcctggagatatcatccaccatgatgtaaaagatgactttgtggccaaccatgaagtatgtatttgcagatattaagaactcctccaagtaatgctcaatgtatctgaaataaagaagaatggggtaaatgtaacctctgggatttctagaggagacaatatgctattatcatctagtctgtattttgcagtttaggaaaggaatgatttttccccatcctggatgagagacgtctgttgctgtaacattcccagctactctccaccattcagtcattcagctttggggaggtggagtggcttacctgactggtgattctggcagggtggctgggcatgctcagccctgctccttcctctctcactcttggaagccaaccaggcagagagaacatgtgttttcagctgctctgggccttgcagtggtaccttagtggcacaggccctgctcccacatccagaggcctgcagttacttgtgctgtatgtgcctggatgcctaagtctttctaattctgtggttcaagatttggaagcccagggcctgcagttataagccacatactccaacaccagctttaactgtaatgaaggtgataactcattaccatctgccttaattagtctttatccccttgtccttatcaatcagttcagatgctagttcttccttttttcctgcattattcagatataactgacatatatcattgtgtaagtttaaggtgtgcaaagtgttgatgtgatgcacttatttttaatttttattttttgtctttttagggccacatccgcagcatatggaggttcccagactaggggtctaattgcagttgcagctgctggcccatgccacagccacagcaacaccagatctgagctttgtctatgacctacaccgcagctggtggcaatgcttgatcctttaacccactgagcaaggccagggatcgaacccaaatcctcatggttactagtcagattcttaacccactgagtgacaacggaaactccctggtacactcatatattagaaatgattaccactgtggcattacttgacaccttcatcatatcacataattaccatttttttgtggcaagaagacttaggacttattctctgaccaaccttaaagtatatattacagtatgattaaaaacaatcaccatgctgtacattagatcccagagcttattcatcttataactgcaagtttgtaccctttgattaccatcagggggcactagttcttagctcttcctcaaaaaccccagcctatattccaatacttttactgacctaccagatgcaagcgtgatgtgcaagggtcattaagcctaaccatcgccactctcttatccttctctgggacccaaacaatggattatggaatatggatattcttccatcttactgatttaccctgtgagtttcccgctggtcaccccaaacaccagcccattatccagacaccatcattataaaacccatccaaatatgagagcaaacgacctctgattcaaccttactttaactatctcgtttcatttaaaaaaatagattttagtttttagaacatgtttaggctcacagcaaaattgagctgaaagtgcagaattccccccgctccccccactcccactcccagcttctcccaccatcaacatccagcaccagggtagcacgtgttgcaactgatgaaactacactgacacatcattatcacaccaagcccgtagtttacactaaggttcactcttggtggcagactttctatgaatctgaacaaatgtaaaatgacatttatctatcactatgtatggtaccatacagagtattttcactgccctaaaaaatcctgtgttctgtctattcatccattctcccacaccatcgcctggcatctactgatatttttactgtctccatggatcagtacctttgaccttttccagaatgtcatatagttggaaccatatagtaggtagtctttgcagatggtttcttggtaacgaacatttgaggttcctccatgtcttttcatggattgatttttttttttaaagcactgctaatactccactgtctgaatgtgctacaatttatcaattaatttgcctactaaaggacctgttacttccaagttttgggcaattatgaataaaagtgctataaacggagttcctttcgtggctcagtggtcaacaaacccacctagttgcaggttcaatccctggcctcgctcagggggttaaggatccagtgtggccatgagctgtggtgtaggtcgcagatgtggctcagatctcgggttactgtggctgtggcataggccggcagctgtagctctgattcaacccttagcctgggaacctccatatgccgcaggtgtggcccaaaaaaaacaaaaaaagaaaaaaccaaaacccaccccccccaaaaaaaaatacctgctataaacatctgtatgcaagtttttgtgtagacataaagtttcagcttttgagggtaaatactaaggtgtgccatcgctggattgtatggtaagagtatgtttagttttgtaagaatctgccaaactgtcttacaaattggttgtatcatttcgcattgccagcagcagtgaataagctttcctatcgctctacattttcatcagcagctggtattgtcagtgtttgggatttgggtcattctaatagatgtgtagtggtattttagctatttacctattcattcaaaaaccatcatgttcaggaagaaaaggaaaggggggagttcccattgtggcagtggcacagtgggttaaagatccagtgttgctgcagctatggagaaggtcacagctgtggctcagaacttccatacgccacaggtgcagctgaaaaagaaaaagagaaaaaaaaaaacccatcacattcctgtcttctgtaagccaagatacaggctattctgtgaagccatggggatgatagagaagggaagaagtagttggctggcttaacacaacccacgtcaccacccagactcatgcccagtgactgtgcactgaatttaatttgttgatcacattatcagccaatgatgacattttgtaataatgactggcacttccttttgttttttggttgctgcttggattccctttgattactacaaacataaactgtgctttcaatgctggtctctggaaaccccaggtttatagtattgattctttaaacggagagaatatctcagcaatacaaggagggacttcaacatggctctggggctaatggccaggaaattcttctgcactctggaactttaagaaaaaatctattgtgccctgaagcttgggaggtgatcctaggggcgagggaggaaacctttgtgaggtttaacattgtttagagattaaagcgctgcagttggtgctgtgcactgtcatttgaaaataaaccaaacatcacacctcctaaaagtccaaatccactcttgggaggatttattgctgctgagtacaaacagtcctcactcgcctcagagcagagtgcgcgggtttcaccaggacatgccaagtacagtttagttctctaaagctgcaacaagatggctagagccaatgtggagccgttctttttggaaacaccaaggttaaatcaatctgcagtatggctggctggtctcctcttataccaaaggattaggtgagctgggaatctttcccaactcctaacagaacatattcttctagtcgaaaggtcaaaactccagagtcacccttctctattagagatgccacccaggcccctgggatcagtacattcagggacattaggacttgattagtacagtgacagtgataccttctgggctctaggttggagaaggtctcaggaggacgcttaaatcttcactcagatcaaccttgaccttcacttctctttgtacaggcaacaggtcaactaacttcttttcttttcttttcttttctttctttctttctttctttctttctttctttctttctttctttctttctttctttctttctttctttctttctttccttccttccttccttccttccttccttccttccttccttccttccttctttctttctttcttcctttctttctttctttcttcctttctttcttcctttcttcctttctccctttctctctttctctctttctctttctctttcccttccttccttttctttcttccttccttccttcctttcctgcttttttagggctgcaccctcccaggctaggggtccaatcgaagctgtgatgatggcctgcgtcagagccacagcaatgcgggattcgaaatgcatctgtgaccacaccannnnnnnnnnnnnnnnnnnnnnnnnnnnnnnnnnnnnnnnnnnnnnnnnnnnnnnnnnnnnnnnnnnnnnnnnnnnnnnnnnnnnnnnnnnnnnnnnnnntttcctttcttctctttcggatttttttttaagtttggtgaaagtatagtgtcttacaatgttgtgataatttttctgtatacaaagtgatttcagtttctttgtggcttcagaaaaggtacagatggaaaggcccatggatgtgggggagggaaggggcacggaggtgaacaggaaaattgaacttttgcttttgttttggaaaaaaagggggggggattctctaaaaaagaaaactgggttatattttaaacgaacattacagctactacttttaagtaagaatgtttacagtttggggagaaaagttccaaacaaggaaacgggggctgaaacaggaacctatccaacctctggaagaggaagttctgagcagcctaatctccccgggccaaaccctccaggaggaataggcagaaggcacagaggagtggtcagccatgcggacgtggaaaaccactccacttaggacacttctgtctttggtccttggtctggggtctcgagagcataggagaaacgacgcacacacaggccatctaacaattgccatttttggaatttccacagagggccgtggaggtcagggcggaggtggctgtgggtgtactgtcgactctgggtgcagtgggtatagcagatcttcttccctgcaacccaagcccctcaccctgaggtgggaaagagttgaccctctgactagttttattcttagcctttggggacctcagcagaagggagtctaaaatggccctgtgacaccattctcctctccactaattcagacatgacatgaacagcctctgtaaacccaggggcccctcacccatcctctgatagtggaaggggaaaaactcaaggccagttttattagcaacacctaccttccgacagcaaaaaccgtcaagcccacggtaattttctgtttggcataataattatctaagacggctctgttgtaagtgccttcccataccactggagccttccatctggttatggtcacgacctctgggcgtttcctggtgacaaaacatagagtcaggatggctttgctaaggtacgacagtctgggggaacatgggtcagtcatggcttgtggtgactggccttgaatcctgactgtattttagccccagtcagctggtggtgtgacattgcagcatcttctgggggagggacaggaggctctggcccaggtgcctctgcgggctgccctggtggcccctttggggatcgtacctgtacaacgtgtatgtaccttccgtccccctgttctgctgtcctcgtcctcaatcttccttccaaaccccttcgcctatctccccaggcccttcctaagctgccagcgacatctttgggtgttgcttatcccagtgggtgccacctgaccctgagaaagccctatggcttgactagcgggatgagagagtgacatttgagctgaaagaggaagaagctgtctcagtttgccttctgccagaaagcaatttctgggtaggaacctggttatcggacaaaaagggccccagactaaggggacctggtgttgtggttcattttacgaagaaggagacagtcacccagaaaagaagggacccggcgggctaactgtggccatgggtgacacacagggctcgggctcagacctctctcagatcatgtcacctcttgactagaagcacaaaagcgggaggggagggggcatgttctctgcacccagaacacttgaaagggacttagcaaagccaacacaaacacaggaagccacggaagagcaacggacaaattgtaaagagtaaatgcgggaagtctgggtagcagctggggccccccagaggcaggagggagctgagaagacttggctcaaaccccatttgctctggaagtggctgcacttccccgtcggaaacagactgaaacgtggtcatttagattcaacccccaacacaacatgagagggcctggcccctgctagctgtgtgcttgtatttcagccactgcagggagaaggccagtggttggggcaacgtcttgggggtcccatcgggcccctgctggctgcctgggtatggccctggtgaggctgtctaggagatgttagcccagcgagaacatacccccaccctcatacgcgggtggaggaagggttttcacaaacctgcccctcccccatgggagaaaccatgtttccctgcgagattgggcaaggctgggtcacccccacttcttgctcatgccttctgtccctcgtcaccaagctctgcacccgtattctggagctgcctctgccctcccacccccaccccatgccctgcttcaagcctgcttccttcctcccctaagagtaattctgcagagatggaggggacatggctaggctgctcaaaccccacacccccagctctgccttcacaccccaggtatgaccgccccttggggacacctgctcttggtttccaacaatcatgaaagaagctgttttggactctgtaccaacttgtgccaggtactttcacatacactttctctcatttagtccttgcaaaagcttggccatgtagtatgctcaatgtacagatatgaaaatcaaggctcaggaaggcttgttaacttgaccaaggccaaacagcagatgatggtaactaacacacactggctccttcctatgggaccaggcacagtgccaagagcttcacccttttgtgggggtggggttgctatattttgattcccattttatctgtgaggaaactgtagcacagagtggtgaaataacttgtctgaggtcacacagctagtaaggagccaagctgggatttgaacccagatagtctgactgtggtctgtgctctgaaccactaccctctatggcttcttggctatttacttgctgtaccaatgaactggagttaaaacccaggtatgtcatcatttccactcatttgagctacttcagcatttttatcagggcagaataaaaaaaaatgatgagctttttttttgtttgttttgttttgtttttagaaacttatgtgatgcttttctcacataaaagccccagctttgttgaatgactggatttcaaaccaaaaaaaccacacacacacacacacacacacacacacacacacacacacacacacagcttaggcttatcattctataaccgtttcccatgcactgtcacttcattcattcctgtccttagtgtagcctgtcaaggatctcttagcagttcagaccccagcctatcagttaagccatgcagctgtgtgtgagctgaacatctggcaagcaggcaatattatctttaagcaaagaaaaggaagagaaagagaaggaggaagaggaggaaaggaaggtattcttatttactagtcgcaagcactggggttaagtaccggacttttattctctcattgaatccttacaaccacgttcaagagtgggtgctatcatcacctccatttcacaaataaagaaagtcgggggtgagagagaaggaaactatgtttttagccattcaaccaataggaggggccacaccagggcatcacctcctcgatgcacatctgccaagtccctgctccatctgccggggcccagggctaaagacggagatcagacccatcctaccccttgagaacttcccatccctgacaggtggtcagcctgccgcacactcctcagccgcacaacccctcagactacaccttctagaaagaccgattcagaacaccagtgtccagtttggttacttggctgggaagattccttttaagcaggggggagaaaaagtagcaatattaaaaattaacgtcgaattaaaaattaaaatgctctatttcccagctgttaattattaaattccactggcaattccaacatgtcagcaaccctgactaggaagccatatgacaggctgaaaacactggccgtgggcaggaggaggaggtgggaggatgattgagatcagcttcctggatgaacctctgctcaaaccccacccccaccccggcccacagaaaaagaagaagtaacagcaggcaggccaagtatgtgtaagagcaagagctgcccaacgtcatcaagagagggctcgaaaaggagggaaaagtccaggaaacactggaaactgctcagttttttaagccgggcacccactgcgttacttcggcatgtggggttccaccagtgcaaaccaaagacttccacaaaataaaagggtctccaaaatccaaacgcaccacctacctaggtagttggtagcttttcaattttatgtacttatttatgggtacactgtggtcctgaagggctgggcagaggaagtgttaaaattctatgaatcatacagcaggtggaaaaaaatgaggaatgcaacaatgtgttacttactggattccttccaggcagcaggacgtacacagtgatccagcaaagagctaatgatgccatggacaagggtgatggagagagggagatgacgtgggaagaatgaacagaacatgtagatgaattagactgtgggctggatgaaggaaggatgaacagtgaatcatggaggtctcctgactcttgcttgagatgggaaatgagaagaatgagggtggggtggaatcaaaaactccctctgggagttcccgtcatggctcagtgggaacaaatctgactagcatccatgaggatgcaggttcgacccctggccttgctcagtgggttaaggatctggcgttaccgtgagctgtggtgtaggtcacagacacggcttggatctggtgttgctgtggctacagtgcaggccggcagctagagctccaattcaacccctagcctgggaaactccctatgcctcaggtacggcctaaaaagacaaaaaacaaaaaaacaaacaaaaaaacccaaactccatctgagtcatgcgagacctgcagtgatgtcaggcaagagttagacacaactgggtgctcagagaaaacctttgggctaaagatataaatgcagtagtcattgtcccatgaatggtatctaatgccacagaaatggatgaagacagtgtataaagaaaagagatgaggataatggactcaacctccagaaactctaacacttcctggctgagaagagggaggggccccaatcaaggagactgacaagggagctggagaagtcggaggaaaactaagaggatgtggtgctacagaggctgagagatcttgatgtaaaaatgtatacagaatacacttaatatgtttcaggtagaatacagaggacacatttctataaatatatctataatatatttctataaatatattaattcagtggctcatctttcctgcatttatgcaagcaatttactttggtgccctgagaaggcttagattagtgctactacatatcaatattctttaaatatctgctcagcattcatttggaggagaaactgagccatgcatgggggaaagtggaaagagtgacagtgggtggctgtggtctttcacctctgaccccagtgattcagccctggctccacctctcaagtcccactcagtaaagcacaagtaccacggtcagtgtgccactctctcttgaagggagcttggtgactgtctctagctgatctatctggcccctggggagtctcacacctccccacatgcacacacatctaaggggcttatcaaagctctggtgggagttcccgtcatggcacagcagacatgaatccaactagtatccatgaggtcgccagttcgatccctggcctcactcagtgggttggggatcctgcgttgctgtggctgtggtgtaggccagctgctgcagctccgattagacccctagcctgggaacttccatatgctgcaggtgtgccccctcaaaagaaaaaaaagttatagtgcttccacattcttccacttccaggagtagcttagcattccatagatggctaccctgtgcccagctcctcaaataacacatggggaggccaaaattcccattctttcacactgacatggacctcccatcctaaaacagtaagaaacttgccagaacatactcagtccttccagagtccaagacccctcatgctggaatagatgctattctcctcggatcctcctcctacctctactgctgctcccactccgtttcagacttcttttcctccctcccctgaccctttaagtgctgatgtcagataagactcagctctgctcctctgcctggactctgatggctcctcttccaatgtctctaccacatatcttctgccagcttaaaggccctgctgtacactgacgattatgtctcccccaaattcgtgtgttgaaacccaccctcaatgtaatggtattaaggggtggggcattggggtgattagatcctgagggtggaaccctcaggaatgggatgggtgcccttagaaaagaagccctggagagctccctctccccttccatggcctaagaacacaatgagaagacgggcatgtacaaactagaaagtgggttctcaccagacaccacatctgctggtgccttgatcttggacttcccagcctccagaacggtacaaaatacatttttgttgtttataagccaccccgtctatggtattctgttacagtagtctgaaggtctaagataggctctccatgaactctatccaaatgccccacaggtacctgaatccacctacatccttaatcaagctcatcacctcccctattcctagacctgtatctcctcctccagtccctttcctggtcaacggcaccagcatgcaccagtctctcaggcctcccagtcatcccggacagcccccaccttctcactcccttccacatcctttcaagtcaggttaatcacaccgccttaccaatcttggcaaatgctagtttcacatctagtgcccctataggactgtaaacttcttgaatataagtgtattgattaatttctcctgtctgtctcctgtgcctaacacaatgtctagtaccgtgactcatagtgaaatatatcctacgtcacaaacacatgcacatacacatatggaagcaaaaatgccactaaacaatacttatccttacttcatgagatgccttctgatttcctatttggtttcaatttttgacccttaagccagtttctaaacacattaatggatcaaataatagtctgacacacatgggctagcatatcataggtgttttaatgaacattgttgtatgcttgcttagagtgtgtgcatggccttgtaaggttttttaatcatcactgccattttattttatttttatttttttagggccacaggtgcagcctatggaagttcccagtctaggggttgaatcggagctgtaattgccagtctgcaccacagccacagcaacaccagatctgagcctcgtctttgacctacaccacagcttgcagcaatgccagatccttaacccactgagtggggccggggatagaatggatactagttgggtttgtttccactgaaccacaatgggaactcgcgtcattgccattttacagaggagttaaccgaacctaagaattttctttatctgattctagattctgtggctttccacagcaccccatgggctataggacctctcctagccccagtatttttttgctttttaggggctgcacccgcagcatatggaggttcccaggctaggggtcaaactggagctacagctgccggcctaccacagcaacgccagatccgagccacgtctgcaacctacaccaccggtcatggcaacgcgggatccttagcccactgagtgaggccagggatccaacgtgaaacctcacagttcctagttggactcatttccgctgtgccaccacgggaactgctagccccagtattttgtgattcatctgttgccattggctaattgctgtcagaatcactatgttgttgcgcaaacatttgagtcaaaacatccagactccccacctcccgggatgccacgccagtcactcacacacacacacacacacacacaaaatccggaccctgttttaagggtctaatagatgctaaaactctgtctcccctgtcgggaatgttctcatggccctgttgcctacacagcccctgccacctcctgctgagctgtggatttactgaaatagggcaacgcttcttttcttactcaggattaaaccagtccactagcggaagctctcctctgttgtcttcttttctttgttccttttcgttgcctatagcgtcttcttcttcgtggtaactgtgagtcctacgtacaaacggaaaacaagctgaggaaggcagggagggtgacccatgtgccagaatgagagtgaggatcttgtgaaaacagattccaaggcagagaacacgtgcgccaagcaaatgtctacagaaggcttgtgatactaaacatttattcgtaaagacgtccgtctgatgaaaaggttcagtgctcccctttttcatcatccttccagaccagcacagttagcaatgtaatgacccagcaattctcaggttctgtcaggagcagggaaacctgataaaacagtccttatcagcgtatgtaagctcatgacagcctttcctgcagcctcaacttcagcctgagcctcactcactcccacatcaaatgggaaaaaacaaaaccttgaaaaccaaacttaatgcccatccccaccacgcaacagagtccttgcatgattccaataagccagaaggacgaggcgactgagaaggtcatggctgtgaaaccattttatttggactctacagccttgagcagatacacagatggccgtttcccagtcttacccattgttaaaccagctcggaaaccaccagcccctctgagcactgctgccaacttctgggtttctaagaaatgaaaaagatgacaaacattttttagaaaatgaggcagtcccaaactggggcagggggtggggggtgttccaaactctttttatggcagatcacttaaaatcattttttaaaaaatcactaattcgtaaaatgaacagaaatgaagctgctccagctgaatgactgaggatggacccgacactccccagatctcccctcccttgggtggcccccggcactccgctggtccagggagccctcgcaggaagagaaggggagaagaagaatgacaagggggagggcactaatccataaatccaagtcctggatctgcccctttcctgttgtgtaaccctgataggacatttttcctctctgaatcgccattgcctcctctggaaagttagagaacaatgacagcaccaaacctaccatgaagatggatggcttcgaagactaaacaaagtagcctacgtaaaagagctttataagctgaaaattactgtagtaagttgtagtcttaaaaaagaaaagcccacatttccaagaatgatctcttgctaaatgaggagaactggagttgctacaaaggtcagcagtgacagattcaggaaacctgagggtttctaaacccgaagctcagcaaactgtaatcagaagccgtttttctccacacacatgctcagatgtccacactcactgtgagagtctctccaaggcgtggaccgtctagaggagggacaagagggggaaagccaggagctgccatgccctttggttggacaaatgaggtggtgaggcaggaataggcatagtagtaagaaacttactttattttactttattattttattttttttgtttttttagggccgcacccgtggcatatggaggttcccaggctaggggtctaattggagctgtagctgccggcctacgccacagccacagcaacttggaatctgagccgcctctgtgacctacaccacaggtcacagcagcaccagatccttaacccactgagcaaggccagggatcgaagatgcatcctcatggatactagtcagatttgtttgcactgcgccacaactggaagtccaagaaacttaaagtccatctactttcaggaagtgcttgaaatggcttatgaagaaagtgtggttacgataaataggaaaacaatacaagaatcaaaacaaaacaaaacgaaacagagaaacattttagtcactcgggtgttttcacatgactttggtcatcccagccactctgtgagaacaaaatctttaactttatttttacttcatagctaagatattggcaaaatgagtttgagcaaattgccaagatcccatggcatctaacaaaagccaggatttaacaccaggggataaatcatatcagatgaaggctactataaatcagctatactttaataagaaaaaatgttttaaaaaaaatgaaggccaaggaaaatgcaagcatttaagcacaatactttgctctaagcttcctagcaaccaagtcgaagataggaaaaaaaaaaaagaaaaatgaaggcttagagtccttaatcaccagtaatagtaataataataaataataataatacacacactagtttatcaggacacccagcctttcttcctaatcctttgtcttggcaaaatttctggcaagggtctttataccacatgtagtaggtagcataatggataatatctactctgattcttttttatgagcaaggcaggaatgttctccaaacaacatcacttaaagagatagatacttgatgagaagcaaaggaaaaacacaactcatgctctagaaaggcaagtctaggggctggagaagtacagctcagacccctggaaccccatccctctcctccacctaggaccacaagtgtgtcaccacctgccatgttaagaatggactgtagggccaccagggtcacatggaaggtgacctagagatatctggaattcaaagcacttactttgactggtatatccagaacaaagaaccttctgggctaaaagcaaatggaaataaaaacatatcatgttacttggaatgcagagaaaagctattttgcaatcattatcattgaaaccctaggctgagctgagagcctgggttgtggctactcccaggtttccaccttcgagatcgaaaaaatgatatcacgggactctcgtcatttcagaattactcagatcaaacggtgggagggaggtctctggaaaatatcaaatcttagtttaaagaaaaaaaaaatagatggcagctcttattgtccaaggtggctttgctgagggagagaggctccagagatgggtcccaggaagaccacagcccacccatccctcacccaggatttatcttcctccagaaaaacaggtcttgcctcgctggctcaaagctgtctacagagtagcctcaaagggcacttctaggagttcctgctgtggcatagtgggttaagaatctgactgcaggagttcccatcatggctcagtggttaacgaatccaactaagaaccatgaggttgcgggttcaatccctggcctcgctcagcgggttaaggatccagcgttgccgtgagctgtggtgtaggtcacagacaaggcttggatcctgtgttgctgtggccgtggtttaggccggcgtctacagctctgattcgacacctagcctgggaacctccatatgccgcacctagaaaaggcaaaaagccaaaaaaaaaaaaaaaaaaaaaaaagaaaagaaagaaagaaaggcagaaaaagaatctgactgccgtggcttgggtcgctgtagatgcacaggtatgatccctggcccagcacagtgggttaaaagatgtggtgttgccgcaactgcagctcaggttgcacctgtggcttggattcaatccctgacccaggaatttccttctttctttctttctttcttccttccttcgtggaatttctatatgccatgggtgtggccattaaaaaaaaaaaaaaaaaaggtacttcttaagctaacaaaagcagtgagaccatcctacaagacgggatcagtaaatatatgacgactctagcagaccgcctccattcattcaacaaatacctgctgagcatgcgttacatgtcaagtgccagacatacagtgttgactgaaacagacaccatgtgtctgtggtgtagagaagctggcagggagggtggaccctattttgataaacacatcattataggacttcaaaactccaagaaagcataggagcacttaacaggaagacctcgaaggctccccaggggaggggatgatgttttagctgagttctgaaggatacataggaggcccagtgaagagggattagcaagagtgtgcctaacagagagaaaaacatgcaaaggccccaagaaaggaaggtcgcatatttatttatttattcatttatcttttggggttgcacctgcggcatgtggaagttcccaggctaggggttgaattggagctacagctgctagcctacaccacagccacagcaatgccagatctgagctgtgtctgtgacctacaccacaactcacggcaatgccggatccttaactcactgagtgagtccagggatggaacctgcatcctcatggatactagtcagattcgtttccactgcgccacatcggaaacgcctgccctcatctcttaaaacagaaacaaaaaaccactaaccactaatatttgtttgagattctgccaaagccccgatctcctccctctgccttctgccccagctgggagtccacatctcctggtaggaatgaaatacatgccttcctaccacctatggtttcccctctaagctcagtacccatggacccagctctaaagtcccttgtttctaaatctgtctattgatctgataatattcataatagctaatagttggctggggacctttctaagcaactgacatgtattagctcattaaattctaataacagtcaatgaaggaggttctattcctcctcagagggacagaggcaataaattattttgcccaaggtcatactgctaagggaagaaacagtatttgaacctggggaatctgacttcagatcctacaagagggggaagggaaaggggcaagaggagggggagggcccgtgccacccagcactcaggagccccaccctcctgccgaggcactcagggcatcaatttatagatttggatttgccacctcgtcccatctttttagtaacccctccctcttcctcatctcaccctcctttcccagaagccttcaacacctcaggtcacagcaacaaccaccctgaagtgtacggcatttaacacatattcatccttcaaggcacagctcggatgccatctcttctgagccttctttggtatgaacctagcacaatgcctggcatacagtaggtgctcaataaatatttctaaatgagggagttcccgtcgtggcgcagtgcttaacgaatctgactaggaaccatgaggttgcaggttcggtccctgcccttgctcagtgggttaacgatctggcgttgccgtgagctgtggtgaaggttgcagacgtggctcagatcctgcgttgctgtggctctggcataggctggtggctgcggctccaattagacccctagcctgggaacctccatatgcctcgggagcagcccaagaagtagcaaaaagacccccccccaaaaaaataaatgcaaaacatagatccatctccaagccaaacataatcttgccctccctgaactctcacgttcctttgctctctctctctgacatcctccttctagcctgtgttgttgggctttcatgggtacctctgcctgctccatctacagcataaccccttgagggtagggattctccttggcgcacactgtacccctcgcagcatttggcatgaacaaccagctccagaaggagccccagatgatgaatcagaagatctgagttctaattagaagttagacataagttcactgttaaggcatttcacctacttgtccatcgcctgaacaatggaaaccttgactaaaggaagggttacccaggttacccaagtcagacagccctggacctaaatcttcctaaaaatgtgaccttgaacgttcacatttaatattgtggaaactcagtattcctcatctagaaatgtggactaacactgaccttccagggctgttttaaaaacaggagggaatgaacagtggagttcctggcacaagcaaacactcaataactagtagccgctaacatcaaaatcaccatcaccatcattactttattatagctcttaaagtttcttccacctctaaaattctaagcttgtggctcagtggcttaagaacccaactagcatccatgagaatgtgggttcaattcctggcctcactcagtggattaaggatccagtgtttgccatgagctgtggtgtaggtcacagacggggcttggatctggcgtggctatggctgtggtgtaggcagctctgattccacccctagcccaggcatttccataggccacaggtctggccctaaaaagaaaaaataaataaataaaattctaagatttttttttttttttcatctagcctttaaccaaatgctgtcctggatgacattcttaaacagctgtatgtgtttgatggagttattttgtaaatctctttttttttttttttcaagggccttacctacagcacatggaagttcccaggctaggggtcaaatcagagctgaagctgccagcctacaccacagccacagcaacaccggatacctgacccactgagcgaggccagggatcgaacctgaatcctcatggatactagttggatttgttaccactaagccacaacaggaactcctgtaatcctctttagctacagtgctacccacctgtctaaggttagtgccctcagctcacctcagaccaattcacaaggtggcaaagaatctcctgccttttaaaccccttgcagatgttcaaatagattcctcacattgaagaatgatgtggctgcagtctgggtgccagactacggccctgaagagcagccagaatctgctccagttactgtgaagagagagtgtgcccagcactgcaaaacaaccctctttatgggaggccagcaccaatatgcacttctgggcctttggcttctgtgttttaattttgtgaagtacccaaaatatggaagtataactctggctgcaattcaaaacaatcaagagttcagagcttgaaggttgcctacacaagcatctcaactcaggtcaggaaccccatggggaacttgctcttctgttagattctttcagcccctagaattttttctttttctttttcttttttctttgtagggccaaacctgtggcatacggaaattcccaggctaggggtagaatccgagctacagctgccagcttacaccacagccatagcaactccagatcctagccatgtctgcaatctacaccacagctcatggcaacactggatccttaacccactgagcgaggcgcgggattgaacccgaaatctcctagttcctagttggattcatttcccctgcaccacaacgggaactcctagaactcttccttctatttgccaaaatctcctgtcctatgctgccctccggacagatggtgatagtggtggtggtgatggcagccagcgcttactaagtacgttgcccttagtgctttattcacaacttattttatccaacaaccctatgaagcaggtactactatcatccccatttttaaagatagggaaacttgcccaaagtcacagaggagggaagtggtggcacaggaccaaccccaggcagcctagctccagcctccactgagaatatctcctcagtcctcaagtacctaagggagccccagggtctctgcatccaacgctgtcatcttttcttcagaggaagtaccacagtttcctcaattcgaaaaggttggtttgtagacatttgttcactctctagctcgtcttgtttttcttaaaatgagttcttcagaatgagagggaataactgttccagaagtggttagatctatgaagcatccaaaggaatgacagcttcttattctagggaatccacctcctcctttttttttttttttttttttttttttggctgcacctgcagcatgcagaaattcctgggccagggatcaaagccaagccatagcagtcacctgagctgctgtagggacaagactgaattcttgaacccgctgagctaagagagaactccctagagaatcctccttctactgatggacctgaagatgcagttcctttctaagtggccaaaatggtcctgctggctcatcaagtcttagaatttaagagacattctaacgttaatccaggccatcatcctgaacttgaggggctactaaaacactacccatcaaaatatcaatggtgatgacatagctctccaggccaagttgttttttggttttttgtttgtttgttgtcttttttccttttagggccacacctgtggcatatggaggttcccagactaggggtccaagtggagctgtagctgccggcctacaccaaagccacagcaacaccagatccaagctgcgtctgcaatctacaccacagcttacttcaacacccgatccttaagccactgagcaaggccagggattgaacccacaacctcggggttcctagtcagattcattttccgctgcaccaccacgggaatgccttcaggccaagttgtaaggtggcctttttgaaagaaagtccaagcggtatcaatacctcttaagtcaaagccatcatgcattttggtagctgcttgcagacatttctttctgtcagaagcgtctccagctggaatctccaaggcatcgtagtttccaaaagcaaagaagcagcgtcaaatatttggggtgaatccactgatgaatttgaaaactcagaaatgtttaattcattttgctttccagagttaaaaaaaaaagacaaaacacccaaaagtttagccaggcacaaatgaatcaccagcgactcagtgtgttttgcagcaaaagtcaacaacttgagttgttcctttaaactctgcaaatattttaggattgcaaaaatcagggtgtatttctcatggaattcctgtctgaaagttctcaaggtaacttccatatctggtcatataaataatttaatattatatcttggtcttaacatgaccttattatttctggctctagcctacccagaactgcagaggtataaaaatcaggacaatggcaacatggcaggaaggaagataattaattagctggaaggtacttgaagatctaatgactttaaagacggtatttaagggctcagggatacaggaagggtagaatattttctttctttctttgctttttagggccgcaagtgtgggatatggaagttcccaggctaggggtcaaactggagctgaagccaccagcctacgccacagccacagcaatgccagatccgagctgcatctgcaacctacaccacaggtcacggcaatgccggatccttaagccaaagagcaaggccagggatcaaacccacctcctcttggatcctaattgggtttgctgcccctgagccacaacggcaactctctggaatgctttctttacggtgtcagtgaatcctacttttaatgcaagctggtgacttggctgataactaggagattagaggagactttcatcaacatcatttcatcatgtttcataattacctgttgatgtattcccaaaacacaaccattacagttgagacaagcagcattgacagaaccactcttcctttgacattcattattttctcctgggaaaagaaaaggagaagggaaaattagattaaatacacccagagtggaatatggttttttaagaagtgcttataccaatatcttttctaaaaggaaaagttgatgaatagtcaacgagcgctaaggagtgcgttctaccttaatttgcataggcctacactggcaaattagccaagtcaatgaactgacagggccgtctgggttgggaaggatactaaggccattttgaggctcaaaggggaagcatcctgactgatcccaaggtccaccgagatgtgggagagtgacgggtttagttaatggtccctaagggctccagccgcccccaactcagatgccccacctcgcatcacagactagaggaagcatccgtttcctaggtctactgtccctgatatactgactatgtaccttatcctcaaagaaaaatataccctggtcctttatttaatttcatttaaattttagggccacactcacagcatatagagattcccaggctaggggtcgaatcagagctgtagccactagcctatgccacagccacagccacactaagtccacgccttgtctgcgaactacaccacaactcacggacagcaacgccagatccttaacccactgattgaggccagggatcaaaccttcgtcctcatggatgctagtcagattcatttcagctgagccacaatgggaactctcaccctggtcctttataatctaggctctgccacttcccacccagcttttccccaatgcacccacacaagtggcaaacagtcggtacattcgtatttcttgatcgctgcatgaaattgtagttgaagagggaagggatgctgggtggaataacaggttgcggagtactttaatttgggtggagatagaaagatatttatttcaaatggaaaggacaagaaaagtgtggcagctagccacatatcagcaatactcataaacaaagaatgtaacaaaagataaagtagggcattacataataacaaagggatcaataccagaggaagacataacattggttaacatatatgcacacgatatcagagcacctacatctagaacgcaaatattaacagacataaaaggaaaacttgcacaattacataatactagtagaggactgattcgcaacattttgtgggtcttgtgatttttttctttttaggtctatttgtctttttagggccgctcccgcggcatatggaggttcccaggctaggggtcgaatcggagctgtagccaccggcctacaccagagccacagcaacgcgggatccaagcctcattggctacctacaccacagctcacggcaacaccggatccttaacccactgagcaagggcaggaattgaacctgcaacctcatggttcctagtcggattcgtttccactgtgccgtgacgggaacgccaacattttgtgttttagatgtcatagtttacatcttcacagctatccttcaactatataatttagtcttttaacatctgtactagtttatttaagtgtttgatgcaacaccttcactatatatttgacttttctagtcttattatttcctttctgtattttctcatatcttgttacagttttttctttttcatttaatgaagacacaaacatttcttgcaagtcagtgtagtagttggaaactcagtttttccttctgggaaactctttagtcacccttcaatttggggagatgactttagagcttcccaagggatgaagataggatgggaaaggatgacaagggccgtgagaagggatgagaatattttggaaacagcatctataccaggcagacaagagaaagagctgctcgtgtttgaaaaaaacaaaagcaaaaaacctggacaagaaaaaaatagtgactgacactgtcccccttgagtggctggtgctaggcagtcagaaggggggcagaggcagtcagaacctggaaaggtatggaaagtagggtggggaatcccaaaaagcatctaaagctggagaatcccctgatccaacttcacctagagagacccatctgggtgctgagtgtggagaatggagaaaaggacaagggcagaccgttctcatgaccataaagaggaggtggcctggctcaaagggtggcttgattcaaaatatactttgggagttcccgtcgtggcgcagtggttaacgaatccgactaggaaccatgaggttgcgggttcggtccctgcccttgctcagtgggttaaggatccagcgttgccgtgagctgtggtgtaggttgcagacgcggctcggatcccgcgttgctgtggctctggcgtaggccggtggctacagctccgattcaactcctagcctgggaacctccatatgccgcgggagcggcccaagtaatagcaacaacaacaacaacaacaacaacaaaaaaaaaaaagacaaaagacaaaaagacaaagaaaaataaaatatatactttgacaaataccatatgatatcacttataactggaatctaatatccagcacaaatgaccatctccacagaaaagaaaatcatggacttggagaatagacttgtggctgcccgacaggagagggagggagtgggagggatcgggagcttggggttatcagatacaacttagatttacaaggagatcctgctgagtagcattgagaactatgtctagatactcatattgcaacggaacaaagggtggggggaaaatatacatgtaagaataacttgatccccatgctgtacagcgggaaaaaattaaaaaaaaatatatatatatatactttggagagagaattgataggacgtggttggtaattttgttatcagagatgagacaaggaagacccaagatttctgcttaagcaggggggttgtagtattttctcagatgggctggaggaggaacaggcttggaggataataatcatgaattcccttttggacgtgtgaatgtcggggagtgtgcgaatacctaaaaggggacagggagacaagtggacattcaagtctaaagttcatcagagagatgtaggcagaccatgcaatcggagaagttgttcatggaccaaggaacgtatcggatctgacgtgaagggaacgaatttgattacccaggagagaatgcagagagagaaagaggaagaggaggatgctgggctgaagctttagaggtaggatagaggagggcccagaaggagaggaccagaaggtagcagagacagaagagtggacacctgggagccaatgtcactgcctttgtgaagccacttcccacccccaccctgaccacggctgaagcccttttctctcctccggcccccatccctctattcctttgctgtacacatcgccctgggagtcggctcaccggataagacctgcattttgctctgcctcctctacctgcttgtttgagcttcctgagggcaggagggatgacttcttcgtcacccctgaattcccagtgccccacagagagcagagaaggccgtcaataaataatgagtggtttgagcttcctgagggcaggagggatgacttcttgatcacccctgaattcccagtgccccacagagagcagagaaggccgtcaataaataatgtgtgggagttcccgttgtggctctgtggttaacgaatctgactaggaaacatgaggttgtgggttccatccctggccttgctcagtggcttaaggatccggcgttgccgtgagctgtggtgtaggttgcagacgcggctcagatcccgtgtggctctggctctggcgtaggcctgcagctacggctccaattagacccttagcctgggaacctccatatgccgcaggactggcccaagaaatggcaaaaagacaaaaaaaaaaaaaaaaaaaaaaaaatgacgtgtgaatgaaatgagaatggcactgagatgtgtcctttcaggggacgggttattctccaaatatttgcagagagggttctgaggtgactccaggcttagatctcaggtgctccatcacctctgttgtgaaatccagttaaagaagagaaagtatgggattatcagccatgtcactctattccttcttgcttggaaagtgagctctgtttggaaacctctgattcaatcgccacctttcggatacaatcatgataggtggtgttccagagacggtgagaagatggggagatggagcttctttcctgtgagcacctcaggtcctggcacaaacagcccggggcccagggcaaagttacgaaatgcacggggctacatgcagctcggcccagatgctggaaaaagccacttgactcctacaccaacagcattagcactgagtgcgaggaaaggcctgggtttgggagcagacagatcggggtggagactgtggccactgtggccatgcctctctgccgttgtcttcactcccagagaagtgtgggtggtgagagagcttgggaaggaggtggggtctggagacacccacagactgggtaaccctgaacatggagcagtttctcagaccctcatccaactccaagctctgaaaaccaaaagcctgtttataattcagttggcatccaggccctgacacgaggctatttataatctttatcacttagtgagactgtttaaacatttctttgcataaatattgatgtacattgttatgtgctgttgctgcactggaggcgttacataatataggataaatattctgcatttgaaaaattctaaattccaacatatctggccttaggcattcaggaaagggatggtggacctctaattgatcacattagatgggtctcctcatctttaaaatgggaattaaaatggtgatgactgcaagagatggtgtccataaaatatttagcatcatgcccagcatcatataaaagctcaaaaactgctagtttgtattactggtatccataaaacaggctgttgggaggatccagtgaagacagcacagcgcctggtacttagcaagagctcaaaacgtatcggagggaaaggaataagcattttggaataagaatgtgttaaacaataaagtacaaattgatgcaaattagggcctctaaaggtttatccatctgttctatgctgcagactgactaaaagctcctgggaaatgccacgcaactttgattttctttgatcaagcccaggccatccaaagccttgtcatccccacctgctgaggatcaaaccctgtgtaagaaatgcgaaagagagaaacacaaactcctggcagagaacggatcagggagaagctggtataaaatcagacacacctcctaatcctttctccaaaggcaagtgtttttctgtttgttttggtttcagggtttgtttgggtttttttgttttttggtttcttttggtctttttaaggccacactgggagttcccctcctagctcagaggttaacaaacctgacttgtatctgtgaccattcaggttcgatccctggacccgctcaatgggttaaggatccagtgttgccatggctgtggtgtaggtcgcagatgcggcttggatccagcattgctgttgctgtggcgtaggctggtaactacagctctgattcaacccctagcctgggaacctccatatgccaagcatgtggcacttaaaagattaaaaaaaaaaaaaattaaggccacacccaaggcatatggaagttcccaggttagaggtcaaactggagctatagcttctggcctatgccacagccacagcaacgccagattcaagctgagtctgtgacctccaccacaactcatcacaacatcagatccttaatccgctgagtagggccagggattgaacccttgtcctcacggatactagtagggctcattaccactgagccacaatgggaactcctttgtttcatttgtttttgatttttttttttttttttttttggtcttttctagggccgcatccacggcttatggaggttcccaggcaacgccgcatccttaactcactgaacgaggccagggatcaaacccgccacatcacggttcctagtcggattcgttaaccactgagccatgacaggaactcctgtttttttaatttcagaaattagcatcagagacaactcttgaagcccccccccccttttcttttcctctggaccgtaaacatggcttgaatctgcttacttttcgctgtggccaggcatcactcttagagacttacagttggaagccacccaaatgagccaatattgcctccttttgaaaagcactgggaaggggtatatgcaagctttctggaatctggaaccctagtgtctcaggaaagaagggttgccagaatggccaaagggtttttaaaacattttttttttttctctggattaaaatgaggcatttggcagcccatgtggtctaaagcccttcacggatgtgtttgtcacagaattttctaactctctaattctcaagattggtggttgactatcttacccaccaaataggaaaagtgggggttgcttctacatttctcatggaagagggagagcacaggattagagcctagagagcactagcaccctgtcttataagggagagtgtaaccacctcagcaccacctgggccccagccctcagaggatcaggtgaacccagcgggcccagttccacctgagccctcccaccatcccacaggccctcctgccaaggcgtttgccatttctctctgctcctgggccactcccacaactcagcccctgcagcggtttccaaaagaaaccacttgcacccccactcccgggcctcgtgcagactgtgctaaaacccagtgcatttcccaaggcagggccacgctggaaagcctgtcatttctccaccttcctcctcctcctcctcctcctcttcggcttctccatccctggggtatcagactcttccccaaggcccataaattaatccttcctgacccacccctaacttgtcccacacagaacggtacacacaccccctccacttcagagaagctcatggtttcaccgcaactggtccaagtcaaggttttccttccagacagagttccactctgaaaggaattctagtggccctgtttttctccacctcgtgtcagggggaaaggtgagcacctcagctgaatcacagagctctcagaagccctggaaaagccattatcttgagagagcagcgagcaagcagtgacagaggaaaccaaagcttccagcagactaaagaatcttcctctctgcctgtgactcttgccctgcccctggaacccatcctgccctgctagctccacaggaccctggcaagggtcaagaaagtcaggtagtgataagtgcagcaaatgaaacacagtgcgggggagggagccaaggtggggaagccgcaggaactgactgggtgttactcaccctggacaaaaacctcctatttttaggcctaacatttagatccagcattccaggcagaaattaggccggtgctgggactggaatctgcagccctacatgcacttgccctgggcaagtcctctggctctgagcctctacttacacagaccaaacggagcttcaaacaccctcctccagggctcttgaaaggacaaaaggagaccccgtctatgaagcatgttgtgcctgatgctcagtaaatgctccacaaatgcagccagaacaagggcgatgctttttacggggagagattcagaaatgtgtggctctgacggccgagctgtggctctgtctgagaggagtctgggccctccagggcagcaccacacagaagggtccagggcgagccccccacgctgttgtgactgttgttggggccagctcagggtccccaagcgcatctcgtttgcctctatcgcctggcgcgcatgttgggcagggaaggaaagtcaggctccagggtcaccccagcacccacacagagcgggtttgtgaaccacacgcagctttctctggcctcagtctccccgtcctttgaaacatgtcctgtgggcttaacttccctgaatgagccaagacctgtatgagaaggcagccacagagctggaaggctccttttatgaggacaggttcactggagctcaacttgctgcagtggccacagattcctagaagtggtgatcaaaagataggattgccagagtttccgtcatgacgcaacggaaatgaatctgactaggaaccatgaggttgcgggttcgatccctggcctcgctcagtgggttaaggatccggcattgccatgagctgtggtgtaggtcacagacgcggcttggatcctgtgttgctgtggctgtggtgtaggctggcagctgtagctccgatttgacccctagccaggaaacttctatatgcagcgggtacggccctaaaaagcaaaaaataaaaaaataaaaataaaaaaagagataggattgcccacaaaatgtgttgagccctcaggccacttcacccagaagcctccgggtcaggcccccaggcaggcctggggtgtggagtgggcaaggcccaaatgcttcctccaggtgaggtgctgcccctgcctgggggaatcgttccagcctgggtgcctgtcctggggctgcaggtggagcccaggtactgaccctgctccccgcacctacctgggtcctaggagcaacctgccccatccaggtagaccttgctgagctccttggagcctctcactttgatcccaaggagaaggagctgaacatgatgctacttggctccctgctcacaggtcacgatccagacctcacaatcacctggtggtgcaccccccactccagccaggatcaaagagctgaattctccaggactctggctggacccacctgagcaagaaactgccaaaagatggggcgtttgaaggacctggagcacctacacaccccaagctttcctcatggtttcagttacaagatctgtgtttggagacctccccttgggggcagggaccatggaaaagttccagctgcaagcagaccagctgggagtggaaatcatctcctcgggctgcaccatcacggccctggaggtcaaagacaggcaaggcagagcctcagatgtggtgcttggctttgctgaattggaagggtacctccaaaagcatccctactttggagcagtggttggcagggtggcaaagcaaattgccaaaggaacatcacgttggatgggaaggagtataagctggccaacagcctgcacagaggagtcagaggatttgataaggtcctctggaccccttgggtgctctcaaatggcatcaagttctcgagggtcagtccagatggtgagttaaaagtctgggtgacatacacgctagatggcagggagctcatggtcaactctcaagcacaggccagtcggaccgccccagtcaatctgaccagccattcttatttcaacctcgtgggccagggttccccgaatatatatgaccatgaagtcactatagaagctgatgcttttttgcctgcagatgaaaacctaatccctacaggagaagttgctccaatgcaaggagctgcatttgatctgaggaaaccagcagagcttggaaaacacctgcaggagttccacatcaatggctttgaccacacgttccgtctgaagggatctaaagaaaagcaatttcgtgtacgggtccatcatgctggaagcgggagggtactggaagtgtataccacccagcctgggatccagttttacacgggcaacttcctgggtggcacgctgaaaggccagactggagcagtctgtcccaagcactctggtttctgcctcgagacccagaactggcccgatacagtcaatcagccccacttcccgtctgtgagttcaaacacaccccttggttctagttttctgtggcctaaggaaatgtaaagatatgacctgttccagggtcaggctggaagccccttcaggaacctgtctcctacgcagagataagatgaagatttagaggttttaaaagtgatcctgtgtattactcagccattaaaaggaaagaaagaacggcatttttagcaacagggatggacctagaaattatcatgctaagtgaagtcagtcagacaatgagacaccaacatcaaatgctatcacttacatgtggaatctgaaaaaaggacacaatgaacttctttgcagaacagatactgactcagagactttgaaaaacgtatgctttccaaatgagacaggttgaggggtggggggatgcactggggttttgggatgatcatgctataaaattgcattgggatgactgttgtacatctataaatgtagtaaaactcattaagtaataaagaaaagaatgtaaaaaaattaagaaacagaaaaaaaagtgatcctgtgaattaaaattacacaaatggtagttgtcatgataatctgaatattgatttctttcacaatgactggctccaggccaagtctaatggtcagctctattctctgtgtagtgaaaaagacccaaccatcaatgtcatcttctaagccctgaccctaatccagaagtggtacccagatccttgtgttggctctgtctctccactctgcttcttttcactccttctttctttgatcctactcattcctttttcccttcctcttctacctcataccaccttgatctgtgcagcactttggagttttcagaggtcactgagctcattcaacctggtggtagagggacctctctgcctcagtaaaagaatagatgatgaagtgagccacctgagaattaggggaggtaaatgacccacctaaaggcgcacagccaggaaaaatttagcctggattcaagatcaggtcatgcaaattcaagtccttctttgcctccacttcagtcttccagagcattcctggagtcattaatgggaaaagggggggtctgacccttactctgttaaagccagaccttctttccagatatcacttttataagaagccctagtcagagtttaaatgtatctctgagccttataaatagtgtgacttaaaatacaagatctaaatatccagaaaaaaaaaatctgtgaatttgattctccgcctttggggttactaagaaagcccagcctagccaagacatgggaaggaagccgctggagacaagagctgtgtgagttcgaggagagggccttgctgggactgcacgctgcaccgagagcagactgtatttggtatacgaggcggagttccctcctctcctaaacaattgaatcacgagtgatgggtttgtgttgatggtttttaaagaaatgttatcttatactcctctacactaataatcagttgaaataaaaccaaaatgtgcaccctcagaaaaaaaaaaaaagaataaaaagaaactgccaaaagactgacagcactaataacaagttatgaagctgaaagaagcttctcaaaactcccaggaataaaaagcaaccactgattaaccatgctagaggcagaactgatttgtcttcctttttgtctctcttaaaaatgatactacaggagttcccgtcatggcacagcggaaacaaatccaactaggaaccatgaggttgcgagttcaatccctagcctcgctcagtgggttaaggagccagggttgctgtgatctatggtaggtcacagacacagctcagatctggcgttgctatggctgtggcgtaggctggcagctacaggtctgattagacccctagcctgggaacctccatatgccatgggtgtggtcctaaaaagacaaaaagaaataaaaatgatactacaaaaatcatcagataaagagatagttcaaagtatgcagccaaaatatgagaggtacatcagacagctgagtaatactaattatttttatattattttcacgtgttatggttgtttttctgaatttggtcctatttagagtattggtcagtctgtgttagctgttgggatggcacctcatattctaaatgcagtcagccttctgtatccatgggtcttacatccacaaattcaactaaccacggatggaaaatactccaaaacatcacattccagaaagttccaaaaagcaaaacttaaatttgctgcatacaggcaactatttgcgtggcatttacattgtattaggaattataagtaattgcaaggtgatttaaagtatatgggaggggagttcctccgtgggctagctggttaaggatccagtgttgtcactgctgtggcaagggttcgatccctggcccatcaacttctgtatgccatgggcaccgccaaaaaataaataaataaaatatatgggaggctgtgggttatgtgcaaatacgatgcccttttgtgtaaaggacttgagcgtcctgggatctggtatccgtggggtcctggaaccaatcccctgtggatacccaaagacgactgcattcaatccccagccaaatcatgtgtctgcaaatttgtgttcccttttcttaaagcaggccctcgatattgaataagcttcctgcagcacttggatgccccccagctgaaccagaccaggcctcaggctaaacgctttaccagaggtttctcagataagtctcacaacgtcctgtgaagtcattctagtgttatctccactttacagacatgcaaatggaagctcagaaaggtgaagtgacttgcccagtgtgtcacacagcataaagtgatggagctgatattcaggtccagagagctggcctcagggcccacccttttaactattctcagtaaacatgaagactcacccatggactaatcacccagggatctttggcacatcctctcattttgcctttcacgatgatcacttagcaattgacccaaagctagccaatcatgggctagactcagcaggggccagcttctcctcggcccagctggcgagcattggctcaactcctctgccatttccaggagcctcctgcgtgcctggtgtgagccttccccatgcacgccatcctattcacccctcatcatggtcagtgcgggggctttttagctgaggagaccgagctttagcaaaagctgagatcgctgggctcccccacaaggggggcgctgagtttgaaaagcagaccctctgcctcccaggcccagctcttggccgggggatggtgctggggggaaggagggagagtcctgctttatctaaaacctctttaaattggcttgcattacagggaaatgctccctgttggaagaaacatggtataatttggggggcaggggtggggggggagtagtgcacggaaggctgtttccagttatgtttttcattataagggtcaaagcaaacacagacgcaggaagctaagagacaagcctcagactaaacatacgaccagctgtcgctccagccatcacagacctgttctcggagggacatcttgtaggcccctttcttgaatccccttcaaaaatctgaagcctggatccagccagcttctccttgctgcctggctcagaaatcatggtgcaagagtttttccaagagaaatagggcgaggtacatgaaggatcggtgctgccctgagagggcactatgtccgcccccagcacaggtcccgggcctgagactcgtcctcctggccccacaatggcactgtgtggcccacacagagaaccccaggctgtagccacaccccgtgaggtcctgccgggcagccaacgaaagcagaaccaacagtgactgagccagcatcctgccagctcccactcctagatccgatgccggggactggaggactttgtcttctttcagaacaactggggggagcagcaagaagtcagggggagaggggggctcctctctccacgctgcagccagctcatgatacccacccccccggtgaccccagcaaagcggaggcaaatcatttcaacgtttcacgtacctcatcctctgcttctctccccccagagtaaaaggcgaagcaagttctagtgagctctgctctgcagaaggaggcagggctgggaggaagggaaggtgctgcgttccaactcctgtcaaaagaataaacagcggtttcacgaagaggagcgcagacggatcccacagcagccaggggccttgttcctccttgctcgccctgggaagtgggctgtttatcaggcctgttgactcagagctgcatgccaaggcagagacgtctctctccggcccaggatcggcccggcctccttcactaagcgaaactacaggtccaaactaggcctggtggtggaggagggacagccaccacccttgggagagacacacaggccgcccacatcacccactcctcggcgaaaatgagaaccattctgaacccaaaccaccccaaatgacaactagcagggacagccaatggagaatttaaaaagaagggggcagaaaatggagaggggtggctaaaggagagcatcctcaaaactcccgttgaaatgctaccttccgagcctcttgttcgcatcctttaggcttcagaagttgttctgtttgaacactatttttatagaatgttctgagatctcctgcatggcaagccaagctataagaacttcaaaaggtcactgaggcccaacccaactctttggctgaataatgcttaaccctccccacacccacctcctgctcccaaaatagaatttcctagctggaagagacctcacagcagtggatttgtaaatgtcgcaacagctaaagctttaaaaaaaaaaaaaaaaaaaatgaagtcattctcagaaccccactatgtaaaacagaggacacagggggctttggctgaaggagggaaatgaagtaagtaggggctcagagcccccccacccattcttcccaagtggccccagacacttcctgggagtagagcctagaaaccccagactaaggagaaggggccgaaacctgacagaaaggagccaagaactgccccctcagcttccagcggatggatgcctaatttagcttctcactcctgttctggggaagaaattcaccgccccctcctctggggcatgagctagttgaccacagtcttcaagatctgcttaataaactactgaaatcctccctgctggcatctactaaagctgaaccaaccacacctcatgttccagtcattccgccccagattaatacctgaaagcaagtgcatttaagttcaaacagagacgtgacctgggaccaaaagctggaaaaaccccaaggcccatcatcagccagatcaggtgtggtccaggtgagggtcacacacatccgtgagaaggaaccagccacagctgctgacatcaacagggtaaatctcacacatggtactgagtcaaagcagccctggatgcttgcatttatttaacgttcaaaaatagacaaaaccgggagttcccgtcgtggcgcagtggttaacgaatccgactaagaaccatgaggttgcgggttcggtccctggccttgctcagtgggttaagggatctggcgttgccgtgagctgtggtgtaggttgcagactcggctcggatcccacgttgctgtggctctggcgtaggctggtggctacagctccgattcgacccctagcctgggaacctccatatgccgcaagagcggcccaagaaatggcaaaaaagccaaaaaaaaaaaaaaaaaatagacaaacccagggagttcccatggtggctcagcagaaacaaatctgaccagtatctacgagaatgcaagttcgatccctggcctcactcagtgggttaaggatccagtattgccaccagctgtggtgtaggttgcagatgcggctcggatcccatgttgctgtggctgtggtgtaggccaacagccacagctccaattggacccctagcctgggaacttccatatgccccaagtgtagccctaaaaagacaaaaaaaaaaaaaaaaaagacaaaaccaatctgtggtgccagaagtcagagtgggagtggtagagactgggaaggggaggctcagagagctgctgggggagggggggggcttgtcatgttgtttctcgagccaggtagtggttatgcaggtgtgtccaccttgggaaaatgcctcacaaacattccctttcagtgtgtgtgttaaaaacaaagatgcacagaaatcttcctgctggaagctgccttctcttgggaattctgacttcccctgagtctacagggtctcagggccacagggtcatggatagaccccgttttttccttctcttgggttcaacgccccaataccaagcaccacagagcacctaagtacggactcagggaagatctttcacattaaatgatgcaggcagctggactgtggtcaactgggagggaaagttcacagcatttggaggctcaggaactgggctaagataaactggtcctttcaagaagcaagcacccaggagttcccatcgtggctcagtggttaacaaatctgactaggaaccatgaggttgcgggtccaatccctggcctcgctcagtgggttaaggatccagtgttgccgtgaactgcggtgtaggttgcagacgcggctcagatcccacgttgctgtggctctggcgtaggctggcagctacagctccaacttgacccctagcctgctgggaacctccatatgctgcaggagcggccctagaaaaggcaaaaagacaaaaaaacaaaacaacaacaacaaaaaaaagcaagcacccatcatggttgccaccttccagtttacaaagcagcctctctcctttaactcagcaaatcctcaggctcacccgccccgggtcagggaagggagggaggcactgggagcctctgtgacttgctcaaagttgccggctggtgggtctgatgctgcccttcctcctgagctgcctctggggaacaccctacaggttcgtggaattagaggctccaggctcatgaatcagagcacgacagagtatgcaaacttggaaggcagaaaattcaacttccagaggatccgacatgaccttcctccttctccgacataccctgatgcccagactctcaaaacaaggaagcatgtacttccggtcattccttcatggagaggcagggaactgtagcaagtgagcctcaggtctgctgatcaaaggaggccagtggccatccaggtaggagtttggcacgtttcccagcccagccaggccgactaatctcatcactcaatgttccccaaggccccttccagccctaacagtccataggcctgtcagatgacagccagcattcagagcctgtccatctgccatgtcccctgcagaggagtgcagggccttggagctgcggctcagcagctgcagcccaggtgtgaagggtcccggcttcatgccccagaccccttccacctgagaaacacaaaggtccggattcccaccctgtgggagagggagaattaagtgttcttggcaaaaagtgctacagatacaaagattgcagctgtcacttttaatcctaaatacgtttagggcaggtataagacattcttgctgtcacttgtgagtgatggagcagtttagttggtttcctcttccgtgtggtgaggataattataatccccaccgctcggggtgggtgaggggcctagagcaccgtggttatgaatgtggactctgggcccaggctgccggagttcgagtcccaggcctgcccatgtgcgatcctgggcaatgtgcttaacctctctgtgtctctgtttctatggctgcacaatgggaacaacagcagctggatggtagctggcacatggtaagtgtctagagatacgtattacccgatattgcaagaattaaggagacacgcccggaaaagtgcttgaggtgctcaatcattgtccgtctctgctgttctattaatccgaggctgcagctccttggagtttacatttgtgtatcaaatagtcattttgaccacgtaaccctgcaggtggggaaaggtacggagggaagggttcctggcacgacgtttccgttactgttaagtactgccccccacacacgcctgtgagtatcagagctgaaacgatcttggcaaaagcccacataataaataacggcagtcaagagaggttgcatctataagtctatttccttgagaagagctggaaaaatgaaatcatgatgactcttcccaggccagtacattgctaatcatcttgagatctgcctctgccccaggtaactccaggacagactccaccaaagccatgctgaagcactcctgcctctgcaagcatccatcctgagcctcagccctcctcctgcacaccaggaagtccctctctggggctcatgtcagtccttcaagctctataggtcagactcttcctagagaagaaagaagctggctttgttgacagctggggagatgtgaggcgctcccacggaagggcgaggcccgggtactgatgacaccctgggcttgagcaccagcacaggtggctggaggatttccccacccaaggaaaccgctctattcctaccctctcttggtccttctcaccccttcctcaggccaaggaccccagatggaggtgagaaagaagcacctgctccttattcacaattgggcagtaggtgccagggggtacccttgcccccgaccccccacagaagttctcactctttcctcagtagagagaacctcaaagtcaggtaagtcagctccctgcctcaaagcaggactgctttttgaacacgtgataagctcatcttccgtcaaggtcacacccacgccccgtttagagcccactgccatccacaaaagccacataacatagaggctaagtaggagaaatattacaagcccaagttataagaaagggaactgaagatcagggaagaaacttacagagtcgtatggtctgagtcagcagccctggaatggaagacaagtttggggtctttctgtgagtctgtcccacctcagcctcgtacacccctggtggtggtgaagccagaccaagctggggatgctaacggaagcagaacaagaagagggtcatgaaccagattccactagaacccaagttctttggggggtgggagggagcacttgtcttctgtcttggtcacttctgggctttcctggtacctggaacagtatttgacatctatcagacgttcagtagatatttgctgaattaatgctgagtgaaagcctacaggagccaggcaggcagcagaagtatgtgaatttgaccaggtaaggatggactgtgataaactagccaaatcagatcaaaatcagattttaaaaagaaaacaggtttcccattgtggcttagcagaaacgaatctgactagtatccatgaggtcttgggttcgatccctggcctcgctcagtgggttaaggatccagtattgccaccagctgtggtgtaggtcacagacacgtcttggatctggtgttgctgtggctgtggctgtggtgtaggccgcagctacagctccaattcaacccctagcctgggaacctccatatgccatgggtacggtccttaaaagacataaataaataaatgaaaaaagaagtacccttctttgattacagaatgtgatatactggccatagatgactcctcttttaagggaaattgttttgtgccagaagcgaaaagtattgtttgaacccttgctccccaacctaggggatgtaggcgtgtctgtcccttctctgtgcgtctgttttctcatctgtgaagtgcaaggtccctcccatttccactccatcctgcctgggcctgagtctgagggtagagttgtgaactgggctcctatagcagtctgactgggggactcagaaggcttcatggaggaggggatgtgaccagacctttccagatgggcttcccctgcctcccagggatctggcatatcagcctgcacagccactcacccttctcttccttctcactgaagacaggctgaaaaactaacctgccgggggaggcaggcagccccacacttcagaatttataaatcctcctctgctcaggctcaggcccagtccatcctgggaggtgctggaggtcattttatgaaccaaccaccttcggctttcggggcgtagggatggggcaggatgccacagaatcaccagcccactcacgagcccccctgaacccttcccagggtgacagaaaagaggaaatggagcacaattccggccccaagacaaagaaactcggccaagcaaagagaagggaaacagcttcctgagtcaggggacttggaatctgctagggccacagggaaccttccccccatcatggtgaggctgaggtgtggactcaagcaactgagaagataaggacaggtgggtccgcccccacccagctcagcccagaagcatttctttccaaagcgcccgtggaaaggagtggtttgcagtgaagaacatttttcaaaaaaatcgaagtctaatactaataatataaccagataaaagaaaggccaagaaagtgccatataaatccaaagacacggttccacaggccacgtggccacaggcacatttttcccctcctgggcctcacgccccgtgtgggcactgacggagtcgaagtggaacattcccaggacccacctgggctcggtggctgtgaagagcctgttgttacttgctctgcaaacctggctgatgaacatgcagccttcagagcgcaaggtcacctcctccaagatctgcctcctggcacaagtggattctcacagccctggtgtggcctgctggtttcacggcacctagagcgcaggttcttggacatatgtccatctcactctctgcacgcacattctcaagggcagcagggaagtctgctttaggtcaaggtccctggtggtcctcaccacagggtctggtagagaggaggtcttgaggatcagtaggctggtgacagatggacagatggacttgctggggctactgtaataaagcaccacaaagtgggtggcttaacacagcagaagtttatcctcttatacttctggaggccagaagtccaaagtcaaggtgttagcagagctggttccttctgaaggtcatgaaaaggaattctacaggcttctctcctggcttctggtggttgccagccacccttggcattccttggggcagcataacccaacaccgtctgcatcatcacacagtgttctccgtgtgtgtcagcctccaaatttccctctctttagaaggacaacagtcactggattggagcccacccgaatccagcatgacctcatcttaatttgagtcatctgacaagaatctatttccaaaaaaactcatattcataagcactggggattcggacgtgaacccattttttttttttggaagacacaattctacccactagagaccgtttcccaaatgcctattggctgggagcgtgtaaacactagcagaaccacctgtgagggtggaaacgctgcatataattacggagttgaaagcgaaagtttggaggcaggcggggaggtaggggtggtcttgagaaagaggaaaacatcttagagcatctctacttggccaggattataggaagaagagaaatgcctccccgggacaggcatctgtgggatgtcccgccgaaatgctgccggtctgtcaatactcagctctgggcatcacagagccatgaatgggtaagcttcctcccaagaggagcaggatgtgaaagaagagggggccctggggcagctggaaccaagaacctatggaagcacagagctgggcaccagattgcagtgggtcaaggaatgaaggtcaggtgagaaagtgacgtgcaaggacctctcgccagcagcttgccttgggaagggctggagggagggtgccagctagagacacatggagcaaaaaggaaatacccttgagtacactgctgataatgaaaagcccttaatgagacagagccgaggagaggagggtttgaagattcagaggagggagaggatgggggctgaagagcatctcttggcggggagatgggggtgccaccaagacaggctgaaagtgctccccctttttgaaaggagcaggagacagaatgggtgggttggcaagtctggggataaagcgggtaggtgacaggctccaatccagagcagctgaagcgaggagggagaagggggccaggaggcagagaagctggagagctgtgcagaatctcatcaccaggaaccttgaacttgcacctgaaaaatgggcatttcatcctgaaagtactagagaatccttgaatgccactaggcaaagaaagttacacgatttgctttttagaagacttccttggctgaaggatgagggagcccagccaggaggctgctggccaatgtcagaggaaagagtagagacctaaccccacaggtagagctggaagacaagaaagaagtggcatcttgagacatagggttacatctatcttactttctttctttcatttttttttttttttttgctttttagggccacacccacagcacatgcaagttcccaggctaggggttgaatcgaaactgtagctgccagcccacgccacagccacaacaatgccaaagccgcatcttcgacctacactacagctcacggcaacgccagatacttaacccaccgagcaaggctggggatcgaacccgcaacctcaaggttactagtcggattcctgagccacaataggaactaccgggtcacgtctttgaaaatctgcttcagtgttactttagagaaactgtcctggatttaaaattactttccttttgtagttatctatctttcaattttatttcttcttctaccagagtgtcaactctgtgggcagatatttttgtgcgtttggtacctgtgtggaaacatctgtctattacagcccctggtgctccgtacagctttgtaggctaaaatgcatgcctggtacagtgcttggcacctgtgtgttcaataaacatgaactatggtgataacaacagcaagaataacagtgagcaatgggatgaagggagtgaggcagaaatgagactagtttggtgggactcaaagtgtggactgagcaaccggtagcatcagcatcacctgggagcttgttaagaaatgcagagcagcaggcccacagcccaggaacctgtgtctgcatgaggtctgcaggtggtctgggaatggggctggttcccaggtttctggttgaaggaggagagtgggtggcatcgctgctgactgacatggagcggcggggctgagaggagggggagtcagtgagttctgctcaagaggtgctgagtttgaagaacctgcagaagtcaattcagcaatgttgtcccagagagagagcccggggagagcccagtttcggagctgccagcccagcgtgcaggcaggagtcggcaggtcttctgtgtgccaagggaaaggagcacggagagcagaatggggcctccttaatgggcaccgccttgaaatctgaggggcagggccgagaggcaggaggagaaacaagaacaaaagttgttgctgggagaaaccccatctgaattctcagctcagctccacccgtgaccgcctctggccctgcttcccctggaagagggaaggccacggacaattgctcgggcaaggttgctgctgtttgagaatcccaaggagcgggactgtcaggcaaacagaggggtggcaacagagaggggtcccgtttccagctgtacctccaactccggcaactccctgcgtgcctggttgattcccgcccccttcggatgacaaggtggggccggggtctctgaccatgttgcctgccagctctctgggctcacccctcatgtccggccacagactctaggggaagaccccagcagagcataatggcagctgccttcagagcacgtgaggaggctccagaggccagaccaagaggtgagggaagggcacgcagggtaggaagccaggattcccgagccaacaggtgtgctctacctggctcccatcagtacagctgagagtcaaggtctaaagaagcctctctgtccctcagccaaaaagggaggcccaggaaccagcaagggccactctctgcatttatcaggtcctagtctggcgagagggacacgtgctgactgcagaccgcagctactgcagttgtgttcagtgggctggggctggcagagtggggctgcacaggtgtcccccggaggaagtcccagctcctccctgccccatcacctgttgtattttgctttaccaccctcccatttttgccatttgtgcttggccttgtcacagcaacccctcctggtgcaggtagtttcccagggcctctaaaatcaaggtgcttcccctagaacagttctgatttatacttgttatggctcaatgttttagtacctcctttcactttcaaaggtgtgcaggtgtggaggacaaatcatgttgcctgtcaccctacataaaaacggttcaataaaatagagttcgatgaagtccccttcaagacgcctctcggcttggaccctccaggagtcagggcttgtgtttaccaacagccggtgccgtgacctccccctctccagcatccttcctgctactgcctgtggtacaagaggtggtaaaagcctttctgccacccctcccctaacctgtccccttcagtgcctgttgctgggatcatctcagctccccctgcctccctgtgtaggctgggaggaattaaaagtctaagaatttactggaaaatcctaaggttgttttgtcttgggcttttttcccccctcactagatttttttcttgtaacaagttgacgagcataaaagaccttccaagaattaatctctaatcatgagagatttccttcctagtggaaagctaaaaataacaaagacaacaacaacaacaccccaaaacctcttaactgagcccacaatggagatggcttttcctctgcctgttctttgtcttttgccatttttttttttttttttaagggccgcatcagcggcatgtggaggttcccaggctaggggtctaattggagcgacagctgccggtctacaccacagaacagcaacgccagatccgagccacgtctgcgacctataccacagctcacggcaatgccagatccttaaccccctgagccaggccagggctcgaacccgcaacctcatggttcctagtcggatttgttctgctgcgccacgatgggaactcctttgcccgttcttggaaagagccaggccccagttcaaatgccagtggcgccccacccccaccccccactttcttgctgcgaagccctggctcagtcacttcacattccgagcctcagtttactcatctgttaaagagggatgataattccttactccttgaattgttgacaagatgaacagtctgtaaagctcctggtaggtacttgggaaaaaagcaacttgtattattatcgctggtccctaagagacaagcactgtccccacctcatcacagtgacaggaggcagtatgcccagagattagagcttgcacttgagcaagacaggcctgggaactgactaaatgcgtgaccttgggcaagtcactggaccttctaggacttgctttttctcctctgtaaaatgagaataacagtgactcaccatcggtgagatgacgcacatcaagcttggcatgacccctgatgttgcagcaagtgcccaatagatggtagtttctcaattcccaatagtgattattgcagaactctccacctcacaggctctggcaccacctgctctgtatctccagggtccactatgttcccctgtccccaaaacaacagcccttcctgtgcagggggcatttacaaatccacctttccccttccgctggagtctgagctgcagcccgtgagtcaggctgggtctccacgtgcggaggaggaggtggaggaggaggagtctggtaactccccaaggggggctcagctgggactggaagctgggtttgggtgcagccaagaatttcttcagccccttcctgtcccacagggagcctgattcagagttgaagggaattacgtgtttgtttatttattcattaaataaatatttaacaccagggagttcccatcctggctcagcggttagcaaacccaactagcatccatgaagacatggattccatccttggcctcgctcagtggtttaaggatctggcgttcctgtgagctgtggtgtaggttgcagatgcagctcagatcccgagttgctgtagctgtggtataggccagtggctacagctccaataagacccctagcctgggaacctccatatgctgcaggtgtggccttaaaaagacaaaagaagacccctcccccccaaaacttaacaccaatgttgatacctaccacgtgccaggcaccattcaggctgctaggtcaataaggattagcctattctgtgcctttctcacagagctagtgggaagtggagcccttcctggtgggaagctgagcccggacagcaacacttctacatcctgaagccaaggtgagtgtcctgtgacagcaatgagtcagcccctctctgggctccatggacttctggaagactcggagagcaagctcacctgcctccttgcccgtgtggctacaggaacatgtttaccacccagggtcactctctctcaagcatggccccaatcttctgagctgcctcactttccagatgagaaaactgaggcaccaaggcagggaagtaacttatccagggccacttggtgatgaggtgaagaggccagggctagtacccaggtatctggcatctctctaggctgagacgcctattagccacagcaccagaaatcaagagcttagagacggggcgaagggctgcagtcaatggtcttcttctagagttttcttattaatgcccaggaaaacctctgatgggacatagaaatgccactgggaaaaggggagcatcgtgtgtttactggagacaagtgaggcacccaattcaaaaagaagatccctctcaaacataaaatagttcagcaatggagtaaaaaacacctaaatatgtgttccacttacaaagcatcctatgggctgtgatgaagaatgtggtttggaaactccgattccaccccattgcctctgccttcacctcccaccccagtgtttagcaccaggagctcccagcacatatcacctacccttttcctggctgctgtcttcttcaatgagcttctgcttttgattcccctagagaggctggcagtttcgggcacctttttgttcctctgcttagcagttggggcggagaagaagtggctttggggtttttcttctctgggtgtggtttcctagccctcacaaaggaaagcctacagcctgctctgtctgcaccaccagcctggttgcctcagctggcagagctgattagcatgcgaggtgcagaagggaacagcctgcctggggtactcaggatactgttctactaaatgtttcctgctctccaccttcatagtaggatttcatttcctggtccccttgcagttgagtagggccatgtgactagtctgaccaataagatgtgagttggcccaagtatttaattgctggtcaaagaccctccagggctctctttctctgtgccatgaagtatattcaaggacgtaactgctccatcagcctggctccttgaatgaggagcacagcccctagctgacccacggggctcatgttaattagagtaagacataaaccgttatgggtttggccccaaagatttaggggctgtttgttactgtagcataacctacaccatcctgactgatacactgcccatctcacacagagtgagatattccctagttaagtctaccatcttcccaatgttgctctttcagccagaagccatttcacttcctctgagctccccttggcctcctgtcacacttctgttctgcactctgacttctacttttagtcccttatatataattacatacagccaatttcacattgtgagcgcctgaagagcaggaatctgtaccttatattatgatgatgataataataataataataaacagaggcagcaaatgctactatttattgaatgctgggctgggttctaagcacttgacattcattcagttctcactaagctctgagaggtcagtactggaactacccccactttacagatgaggaagcatctcagtttggttcagctgaaattgaacccctaataatatatatatatatatatatatatatatatatatatatgcattttttttttttttggtcttttcctagggccacacccgcagcatatggaggtccccaggctagggatctaatcagaactatagctgctggcctacaccacagccacagcaacaccagatctgcaacctacaccacagctcacggcaactccagatccttaaaccactgaatgaaaccagggatcaaaccggcaacttcatggttcctggtcggatttgttaaccactgagccacgacgggaactcttaatatttttttaataaatatagttcaacttaagtcattccctctataatcctagtcacttatttttcacatttaaaacattcccagaaggggtctataggctcccccagatgccaaaagagtccatggcacaataaaggttaaggtcccctgtagaagcagataccagggttacagtgacagggttctgtcccctgttctcctggaacccagagtttctggctggtggagggtaagggaccctacaccaaattcatgccacagtggggagtgaacaggagctactttattgtattcacatagcataaacataaatatcgtaggtttggcatatggaactccctgtcatgaatattttgatttcagcagtgtcagcccaagtataacattcatcacagtaaagaagtcacttgtttccccagtaaaaaaacaaaacaagggcgttcccttcatggctcagcggttaacaaacctgactaggatccgtgaggatgcaggttcgatccctagccccactcagtgggttaaggaactggcgtgtaggccggcagctgtagctccgattcaacccctagcctgggaacgtccataagtcgcaagagtggccctaaaaggcaaaaaacaaaacaaaacaaaacaattcctaacatccagtgtgctaattagaaaagcatcagctcttgatcacaaattgggataacaggacagcagccatctctggtcagtcccactcccagacgatgcatccttgagggcagatgggccgaccacccacgatgagacttgctttcttagcttctgagcactggcttggtccaagtagcactcacataatctcccatattgtatatgctgaagttttatactttattgaaccagaatttactttaaattccaggcatccaaacatatacactgaatccaggtgaatccaagcagaactctctggatttcagaaatcctgggtgattacaagactcagggataaggtagcagagccaatgctctgtgcctccttgccagctggccagtagtgagggctgagccccaggacaaccgggtggcagtctggcactgccctggtgggctggatgaccttccgcaaattacaggctcagttttcgtatcctccaaatatggagccatactagatccaagtccaggcaagaaacaatcacaaggcacccgcgctacgcctagtactgtggggaaaacagaaattacacaaactccataaggagcttacattctagttggggagccaggcctggaaacaatttaactattgtgcacgacagaaagaagtaagtatgaaggtggtggaagccccctcttgtgctctgggaccacagaggaagcacgaagccaggctgcataggcctgcgcagctcggtttcaaagaggaaggggctatgcttgaactgggcttcagagggtgagtaggagtctgatgggtgaggaagggcatacaggtggaagggcaaggatctgcaaactcggggtctggaatgggaagccccacccccagcccagatcccagcccaggggttccagtcctgctctctccacacatccgctgctttggaatctggaagagtcctggaaacctgtattttgaacaagctcccacagtcattctcacaagcaggcagtgagtgttatagattgagaaaaatgaatgaacaaatgaatgaatgaatacaaaaatgaacctgagaagttcctgttgtggctcagcagaaacgaatccgactagcatccacaaggacgcaggttcaatccctggacttgctcagtgggttaaggatctggcattgctgtgagctgtggtataggctgcaggctcagcttggatcccacgttgctgtggctgtggtggaggctttcagctgtatctctgactcaacccctagcctgggaacttccatatgctgagggtgcagccctaaaaagacaaaaaaaaaaaaaaaaaaaagaacttgacttccggtaagtccctttctctcttaggatgtccacactacattaaggagctaaagagcttcagttgtggctcagcagtatccatgaggatgcaggttcgattctgggcctcgcccagtgggttaaaggatccagtgttgctgtgagctgcagtgtaggtcacagacaaggctcagatcctgtgctgctgtggctgcagctccgatttgactcctagcctgggaacttccataggccacacctgcggcccttaaaaaagacaaaaatgaaaaaataaaaagcaaaataaaagtgctgaattggcctggtggctttcaaactgtgttccagaaaaaccccagaatctccctgaagtccctcagggacacagaggaactggggaggctgagagagccggactctgggccccatccacccttctcagattacctctccttttatctctttgctcttttttttgcaataaagggttcttggctacaaagaactcttaaagccactgaattgaataatcctagaattcccaaggagtcagagttcccattgtggctcagtggttaacaaatctgactagcatccgtgaggacgcgggtttgatccctggcctcactcagtaggttaaggatctggcgttgccgtgagctgtggtgtaggtcgcagacgcggctccgatgctgtggctgtggccagcagctacagctcctattcaacccctagcctgggaacctccatataccaccagtgcggccctagaagacaaaaaaaaaagaatccccaaggagaaatttaaaaatttcttgagggcagcagcttacctttggcaagtatgaagagagcataagggtctttttcagaagcaagttatttaatcatcacattttaaaaaccttttgctgtggcccagaaattagtgagtgaaggaaaaaagcaatgtggtataataatgcaagggaatattatgcaacctttaaagaacacttttgaggaatggttaatacaatggaaaataaagtgaggaagtcagatacaaaatttcatacagactgtgatttacggtatggattttttttttttttttttttggctacacacatgaaagttcccaggccaggaattgaacctgccacagcagtgacctgagccacagcactgacaactctggatccttaaccccctgcaccagcgctatggatcttatacatcaaaattattggacatggatgttagtaggccggtagctgcagctccgatttggacccctagcctgggaacctccatatgcctcggatgcagccctaaaaaacaaaacaaaacaaaacaaaaaaaagaagaatgcaattctgacatgtttcagcacagataaaggttgaaaacattacgctaagtgaaataagccagacacaaaaggacaaatagtgtgtgattttactgagatcaagcacccagagttgtcacattcaccgagacagaaagtagaagagcggttacgggggtgggggggatgggggtgggcagtgggaaattactgcttaagcagcacagagcttctgtctgggatgatggaaaaattcagatggttgacactggggatggctgcccaacgtgtgaatgtgcttagtggtaccgaactatgccctcaaaaagcattagaatggtttatgctatgtatcttttaccacaataaaaggggaaaaaaaagccagaactaggtgcataggttatagtggtgaatactatgcgacaagcttgtgggcagcgtggtcactttattctttgcatttctctgcatttttcaaacgtcctatgatgagcatacatttctttttaaaaccagacagaagagcgagttaattaaacaaatctcgtggttctctgacacttttgcccaaatgcgttactgtcttttgcgtaaatgtaaggtgtgttccctgtccttcgttaataaaaggagccgagcccaaggatgccaacgaaaggatacaccgaggtgctcaagtcaacgacaggcacagcggccctcctttctaagactcgttgctctcgtctatatttaataagttccaaataaaaacagaacccaaacaaatcctctaatgaacttcctaagaagctgtctggcttggaaaagctcaaaggcgaactgaagagaaagggggaacagctgctgtgtttttagggcattaactcactgcagctgggacagtgcctttgtcagtagatttctatcccttcttgcttctgggaaatgttcttgggcagaatgaattcagaaaccaggagaggctccccagtggtattccctgccaatccatctgctccagtaccctctccccaccccagaaacatgctgaacaaagatttaaagactcttggtgtgaagggcagccacgtgtctgcctgccagggtgccctccaccccaggccgcctgggtccacttgcccggctcctgggccctctgctcaggggtggcacaagggcagaaggtagctgccacgataagcagaccggggctacccctggagtggcccctccctggctacgtgacctctgcctttttcaaatgttctatgatgagcatacgtttctttttaaaaccagacagaagagcgagtaattaannnnnnnnnnnnnnnnnnnnnnnnnnnnnnnnnnnnnnnnnnnnnnnnnnnnnnnnnnnnnnnnnnnnnnnnnnnnnnnnnnnnnnnnnnnnnnnnnnnncgtatatggaccataccaccttcccctggccccaggttctcacctatgtgactgagggaggtggactggggcacctcttagatctctgccagctcacacatcctatgattgcatcatctcaaaaagaaaaagaaaaaccaacaatacctaaaccaaactaaaccctaaaaccaaaaccaaaagcagggtgccttctaggaatctaggccaggttcttacgtttgggggggccttggggtccctatctacaaaatgaggcacggagtttccaccatggcacagtgaaaatgaatttgactagtaaccacgaggacgcaagttcaatccatggcctcgctcagtgggttaaggatctggggttgctgtaagctgtggtgtaggtcgaagacgaggctcggatctggcgttgctgtggctgtggtgtaggccagtgcctagagctccaattggacccctagcctgggaatttccacatgccacgggtgtggcactaaaaagaccaaaaaaaaaaaaaagggaaaagaaaaaatttggcacaaccttccagctcgttccatgtccaacatctgtaattcctgaaaggaaggccccatcctccccttgccctccaccacgtcctctacctcaggccaggctcacaaacaggaaatatgacattcgagagcagcagaagcactgcttgcttctcgacagcataggggccgatggagaacaaagagtttctgagcttttccagcaacaaccagggctccatgcccaagaccttccccaagcagtgcaggcagaggacactgctgggatgggctggcctcccatgccatccccgccccggtgtgttcccaggggcccccggcagcgcagaatcagcagataagctgtctggccgtaattacacgctgatgcttgaccaaaggtggtaaaaccctaaacaggcggaaggcagggtgcaggattcctggactccagtgcaggagtggagtgaccctagagaggccctacccctctctgggcctgagtttccccatctatttttttttttttttttttttttttgtgtgagtgcgtgtgtgtgtgtgtgtatgtccccctctatttgaatgaaagggctagaatggggcctaatggcagctctttgcttgctccgaggtcttcggtttttcttttttcattccatttttttttttttttttatggccacacccacggcatatggaagttcccaggctaggggttgaattggagctacagctgccggcctacaccacagccacagcaacaccagaccccagctgccagatccctgaccatagcggatccttaaccttacaccacagcggattcttaacccactgagtgaggccagggatcaaacccgcaccctcatggatcctagtcgggtttgttacagctgagccacgacgggaacgcctgatgtcttctttctgaaggcagtgtgtggccttgatgaaaggccccatcatcttgcctgtgtctgcgtcccaaatctctccctcaccacgtgaccctgagaaactgctaaatctttctgtgtttcgtttgctcatttgtaaaactggggttgctgggtgatgaaaaggcagagctcctgtaaagctcctaggacagcttctggagttagcgcccaggaagcgtgcgctcttgctgttttatgatttctctggtttcagaatcgctccccttgccctgtttgccatctgaagaaggagcaagcatggcccagagagccatactggccctgcagtccacgtctagccctctccctccaagaaagcacatgtgaatcttggtcagccaagcacagtgggaagagggaactatgggagaaaaggcagaaaatcctacgatgctgccccacagcagatgggctcgggtgtcagctgctcccaggggttgctgggcactagagaaggcctccagctgcacccagagtcagtagcggagggagggtcctgggctcatctccagcttgatccccgaatggggaggagaatgaccccgtgggaaggagggtgatgagatgcagaagatgcagccgggtttatctctgttcctactttgccgggaccattcagggaagaggaggccacattcagtcatctcagccccgaggggaacagggaacagagaggggtgaggatgacagcactggtggtctctcccctggggacatggaggtgtggcctccctctgccacagggagggtcccaaacctgcctgtcctcagtgttctcacctgccaagggaggagacgcaaatgcctgtttccaccaggcgctctagggtctcaaattgtggctgcggacggatgcatcgaggaggcacagaaattgagagtgttttactaaaggaccagtccacaggggattagaaataaaggaagaaaggcctgatcttctaccacactgtcctaggacataaagcatgatgcgggagacaggcaggacccctgttccgcctcctggggctaccccgcttggctccagtgagctctgtggtccaggtggaattgtgggctcccatctggctgggacgactcacccagacagactgccctcctgatccgagagcatttcactcggcagcaaattcaacccacctcaaaatatcagctgcccctgatcaggcagggcctggctccctctctgccaagccccacagggctgggctgggatcagtcatggcagctcaagggaagtcacgctgcacccagaggtaaaagctgtcctggcagagaaagagaaaactgatggtcctaagaacaagcacactggctttcacccttgaggacgctcagttgagaatctcggtttgggagttcccatcgtggttgtagatggctctggtgtaggccagtggctacagctccaattagacccctagccagggaacctccatatgccgtgagtgcggccctaaaaagacaacaaaaagaatctctgtttggctgccctgtgtggcaggtatgcatttatcaggtatagagacattttacagatgaagggagcccaggggatctttgctcaaactcttttttttttttagctttttagggccacacccgtggcatatggaggttccaaggctaggagtcgaatcagagttttagctgctgccctatgccacagccacagcaatgctaaatccgagccacatctgagacctacaccacagctcacgccaaagctggatccttaacccactgggcgatgccagggatcaaacctgcaacctcagggttcctagtgagattcatctccactgagccacgatgggaactcccaaactcttttcttttacagataaagaggctcaaggaaaggagcaccttgtcgcagaagcaggatttgaaccctccaaggctcctagccccatctgcattcagcctgccaatccacggttaggagggccaactgcacacatgcgcagtgtgggatgtggtgaggaaccacacaggaaaagccctcagttctcacagagctcacattctaaacaaacaacaaaatcagtcattataattaacaaatcattaaagacataatttcaggtgggggagagggttataaagcaaatttaaaacctggcgtgtttgagagtgttttggggtgggggcagctgctgtttgggaatggcctctttgcactggatcctctcaggtcctcccaagccagtagaatgctggagctggctcctgctggcttgcaagggccacgtctcattaggaatttggcgagcaagttgttcaccacagccattattaaaaattaaattacataaacttagaactaaatgaattatagtacgacggaaggtaatcatcaaaagtcatcactccctcgggttcccaggtggcctagcagttaagggtttggtttgtccctgctgtggctcaggttcgatcccagacctgggaactttccaaggccacaggcacgtgaccaaaaagaaaaagaaaaaaaaacttcattaatttcctctttgtatgaccacatactatactcttgaagttgtttatatctattgaatctagacgtaatagatactcccagttcctccagtagtagctagaaactggtcatggtagaaatatgtctactatggaaactggcaaataccctctacgagggctttcacttttcaaagagctggtggtgaaatatttaccagcacagccttcagctctaatccaggccttctatgcctgtgggagtctgggttcttccaaggagagggtgtggtggtatagtctaactctcctggggctgggggcgaggggaggtggtgggcagtgcctccagccctgtcctcttcttcttctgtgtgtgtgtgtgtgtgtgtgtgtgtgtgtgtgtgtgtgtgtgtgtgtgtgtgtgtgtgtgcttttcagggctactccctggaaagttctcaggctacatgttaaatcgtagctgcagctgccggcctataccacagctcatgacaacactggatccttaacccactgagtgaggccaggggtcaaacctgagtcctcatggatactagtcgggttccttactgctaagccataatgggaactcgggcagtcagattcttaacccactgcaccacagcagggaccttcttcaaaagtgtttttcaacagggatctgtaagagggtgattcattccttcctttgttatttatttttgataaatgaaatcctatcataagcataccaatataaatttaaaggaaccctgccgagaatctctttgtataaatgcctgcagtcacttctgagttcccctagattttcataggtggagggacttccttagagaatataactgttctcattaacagcagactgaagttactattacctctactaataacaatgacaactgtagctgtcttttactggcaccacctcaggcactaggcacatatattatctctaaagtctacatcaacccattttacacataagaacgttgaggttcaagggttcaataacttgacctgaggccagcctgctgctctgaaagtttcacagaaggctttttccttctgtagcgacagccctgcgactctccttagacctgcaggattctgtggtcctacaggaccccccatctctggtggtttgggagaatttcgtcacgtctcagcttagtgtaaggaactcccttccatcagcagaacagaatgagccagacgctccccctggactttcttttttttttttttttttttgtctttttgctacgtctttgggtcgctcccgaggcatatggaggttcccaggctaggggtccaattggagctgtagccactggcctacgccagagccatagcaacgcaggatccgagccacgtctgcgacctacaccacagctcacggcaatgccagatccttaacccactgagcaaagccagggattgaacccgcaacctcatggttcctagttggattcgttatccgctgagccacgatgggaactcctccccctggactttcacctgcaatgcaggaaagtgacccaggcctggtcacttagcagcttcccacccaaaagaagtagcactcaggttctgataccagtgaaatgttaacagcggctccagtgccagcaagagctagaattaactcctgttgggagaccctaactgtgttaggtctgttgcctgacctctcctggttctgagcagcttggttttcaagctcccccaggaataccatgagcaacaaccaaaaaatccttccaaggcacatacctcttctgcctcggtgagctagaatctccatcggttgcttgtaaccacaatttctgacccgtacctcatctcaagcgcttctcaatatatcagccgcaaacattcgctgagcctttcatgccagagaaggagctcctaagcactcaattagtttgcacagaggaatagtaatcgtgcctttctgtgcacagctctggcataacctatgaaaacggagtttgccacacaaaatagcaatctgcaaacaaccacagctcaactgagagcaaatccaggcccagtccctgctccccgggagccatattccccctaaagaaaaccccttccttgattttgtcaacggtcttgtctttccccacagatgccaggcaagttcctcttggggacagctggccggccacttgaggacttgcgatttccctgacgtaggagaaaggacagctgggtttctgcacacagatgctgccaagcccaacgtcacccttctgggcagctgacccattgccccgggcttgctccctcccctgtgcccctccagacaccagggccatctggattctggaacagccatggggaagatcaggatgactggttctcaggacccctttcctttgcctgaaacgctcttcctttttcaccctctacatcctgcgggcctcagtttaaagatcacttcctcagggaagccctccctgaccacttccccagacaagttcagggccccaggaccctgccctgtttatctcctccatgtctctgtctgtgcagttcattgtttactgactatctccccagctgaattctagcctctgcacaggaagggattgcacctctgttcaccgaatctcaggttatctagcacagcatgtagttccataaatcctgaacgctttaaagatgagtgaaggacattctggcggctcagtgagcgctgaatgagtatctgatttaaagcatgcatctcagcaacaggtgcatcttttaggaccaccgttttctggtgcccaaactcacaagggcagggtgaaaatttagccatccctacttctccccgggtcgtttttagtttgaaggtttgtttcctgtgggttgggactggcccgatttttgtttaacagcagctattgctcagagaggagtttgctagatgccagccttataccacctggttgatggggaaactgaggcccctaccactggctgcaccagcaccggcggggcgagaccagctctctttcagcccagagctcatttcagggtccttcgccccacatggggccaagtccagggcatgcgaagcaaggctcgggaagataagggcacccagacggggatggagtttgaaacttttattaagaacgaatcaagagggaattcccttcatggctcagtggttaacgaacccgactaggatccataaggacaagggtttgatccctggcctcgctcagtgggttaaggatccagcattgccgtgtaggtcacagaggcggctcccatctgtgttgctgtggtgttgctgtggctgagatgtagtctgacagctacagctccgattcgacccctacccggggaacttccacatgccatgggtgcagccctaaaaagcagaagaaaaaaagaagaagaaatcaagagacctggcctctctctctgcccagcctcttccagctgctaccttccactctctccggctagtttcaggttgagcaaggccaggcaggagccctctcgggggctgagcatggatctgggccccagcagcgcccccaaccttcagattcaccttcactctccttgctcagggcccaccagggtctccaagccaaactatgtttgaagtcaagaccaggctttcatgctttggttctgccacttcactcttgagagatggtggccaaacaattaaaacgctgagcctcaatttccctgcctgtaaagtgaggaggcggggggataattcctgctttgctgacttcatagggcttttgtgaggctcaggcgaggtagatatatgtactcactcgtctaactgtccactagcttagagaactctaacaacaactctaggagttctggcagtgggttgagaatccgactgcagctgctcaggtcactacagtggcacgagttcgatccctggccctgtgcagtgggctaaagatctagatagagttgcggcagtgatggcataggttgcagctgtggcttggattcaatccctggcccgagaacttccatatgacgtggtgcagccgtaagggaaaaaaaaaaaaaaaaaaaagatactgtttttctggtcccattagggtcttgcgatcaacgtgtagccagcccatgtcctccagggcccaatcctccacccaacctctcagccaggctctcctcttgaccacatccttctagaaatcctttctgcctctgccttcctggatgtgctccctctgggctctcctccatctcaggtcactcattctcccagttaggacctggcccacctggcagctccgtgctttttcctgccattcacgtcagccaaccacacagggcctgggacaggaactgcagggaacacataccaacactcagatccctggataaggcttgcgtgcgcattccctggggcacaaaacatgcgcacaaagcattgtgtccccaccccactgccctcaccacccctcctttgctggggcatagggcagaacccacagcagacggaaattcccaggctaggggtctaattggagctacaactgccggcctacatcacagccacagcaacgccagatccaagccacatccacgaagtacagcacagctcacagcaacgccggatccttaacccactgcgcgaggccagggattgaaccagcaacctcatggatacttgtcagattcatttccactgtaccccgacaggaactccaccactcctcctttaagagactctatttggcaataaagccagagccaaggctctggcaagagttgcagccaggtctgatcataggcagccaaggtctgtggccctccaagccgggctgggacaagccaagcagatcagctcctcggctggagatttcaatgacatatttttaggtcagcctctctttagaattgcaaggacttttataaataattctgggttaagtatattccacatgatgacccttctgccttcagtccacagtccaaatctacatcactctctggtgtcccagactgacccacctggcttccctctctcaagactaaggctgaagcttttatcagcagaccttgcagcccagggcagggggttgggcaggggggaaacgactttgccccagttgcccttgggaggccacttacccacaagtgtgggttaagtaaagggcactgcggtcacatgcccagtgtgccatctggcttcagcagccaccgtcaaagagggaagaaaaagtgacatgcaacagaatgtaaccggggcatggcctgcaggatgcccagggacctggggggcagaggggtgccaaattcatggggggcttctcagagagggtggtgattaagatgggccttgaaggatgtgtaggagtctgtgggagggtttggggaggaggtgggagggtgtcctgggcatggggaaaagtccagagccatcgaaccaggagagggtttcaggaattgcagcagttccctcaggctggagcagaagttccaaaggatggagtggtgagggtggtgagggcttcagagggctgtctgtatgggaccttggaggtcacccaaaggaatgtgtgctttatcctgagagcagagggagccttggaaaagatggaaaactccaatcaattaggtgtttggaaatgagacttaggctgcagggagagggtgtataggaacaaagaacagggagcatgcagcagcaggggctgggctgaagagggctgcccaccagcacagcaggggcaggggggctggaaggaaagggtctctttttttttagggccacacctgcggcatatggaggttcccaggctaggggtcgacttggagctgtagccactagtctacaccacagccatagcaatgccagatccttaaccccctgagcaaggccagggatcgaactcatgtcctcatggatgttaattgggtttgttaactgctgagccatgacaggaactcctaaagggacactttggagagctggtaaaggggtgggattgactgaactagattagactggaggggaatgtttgttatgcagcataactgcagccaaagctaacagaggggccacatgagcaaatatatagagacagaaaggccactgccatgcttgaagaagcggaacgatggtgctgatggtaccaaagagcaggctgtgtgatgggcattagtttggagagagaaagataggtggggacctgcacgagggagtttctaacaaatatatgaagttgattggattgttgttcccaagtatctattctgggccaataggcagagcttatcgcagtcccattgactttagactcagtcacatgaccagctttgaccaatggaatatggatagaagtgaccatgtgccaattcagagatttaattttttttttttttttttttgtcttttgtcttttgttgttgttgttgttgctatttcttgggctgctcccgcggcatatggaggttcccaggctaggggttgaatcggagctgtagccaccggcctacgccagacccacagcaacgcgggatccgagccgcgtctgcaacctacatacaccacagctcacggcaacgctggatcgttaacccactgagcaagggcagggaccgaacccgcaacctca

SEQ ID NO: 193 - DNA, 22 bp, Artificial Sequence
  Description of Artificial Sequence: Synthetic primer
cttcgtgaaaccgctgtttatt

SEQ ID NO: 194 - DNA, 22 bp, Artificial Sequence
  Description of Artificial Sequence: Synthetic primer
gactggaggactttgtcttctt

SEQ ID NO: 195 - DNA, 22 bp, Artificial Sequence
  Description of Artificial Sequence: Synthetic primer
tgagttccttacgtggaatgtg

SEQ ID NO: 196 - DNA, 21 bp, Artificial Sequence
  Description of Artificial Sequence: Synthetic primer
tcttcaggagatctgggttct

SEQ ID NO: 197 - DNA, 20 bp, Artificial Sequence
  Description of Artificial Sequence: Synthetic primer
ctgctctgcaaacactcaga

SEQ ID NO: 198 - DNA, 18 bp, Artificial Sequence
  Description of Artificial Sequence: Synthetic primer
tcagcagcagtacctcca
